(19) United States
(12) Patent Application Publication
(10) Pub. No.: US 2014/0328862 A1
(43) Pub. Date: Nov. 6, 2014

(54) HUMAN IMMUNODEFICIENCY VIRUS NEUTRALIZING ANTIBODIES AND METHODS OF USE THEREOF

(71) Applicants: Johannes Scheid, New York, NY (US); Michel Nussenzweig, New York, NY (US); Pamela J. Bjorkman, La Canada Flintridge, CA (US); Ron Diskin, Rehovot (IL)

(72) Inventors: Johannes Scheid, New York, NY (US); Michel Nussenzweig, New York, NY (US); Pamela J. Bjorkman, La Canada Flintridge, CA (US); Ron Diskin, Rehovot (IL)

(73) Assignees: THE ROCKEFELLER UNIVERSITY, New York, NY (US); California Institute of Technology, Pasadena, CA (US)

(21) Appl. No.: 14/118,496

(22) PCT Filed: May 17, 2012
(86) PCT No.: PCT/US12/38400

§ 371 Date: Jul. 25, 2014

Related U.S. Application Data
(60) Provisional application No. 61/486,960, filed on May 17, 2011.

(51) Int. Cl. C07K 16/10; G01N 33/569

(52) U.S. Cl. CPC C07K 16/1045; G01N 33/56983; C07K 2316/50; C07K 2317/76
USPC 424/160.1; 530/389.4; 536/23.53; 435/320.1; 435/69.6; 435/5; 435/339.1

(57) ABSTRACT

The invention provides broadly neutralizing antibodies directed to epitopes of Human Immunodeficiency Virus, or HIV. The invention further provides compositions containing HIV antibodies used for prophylaxis, and methods for diagnosis and treatment of HIV infection.

### CROSS-REFERENCE TO RELATED APPLICATIONS

[0001] This application is a U.S. National Phase of International Application No. PCT/US2012/038400, filed May 17, 2012, which claims priority under 35 U.S.C. §119(e) to U.S. Provisional Application No. 61/486,960 filed on May 17, 2011. The disclosures of which are hereby incorporated in their entirety.

### STATEMENT REGARDING FEDERALLY FUNDED RESEARCH

[0002] The research leading to the present invention was supported in part, by National Institutes of Health Grant No. P01 AI08677-01. Accordingly, the U.S. Government has certain rights in this invention.

### FIELD OF THE INVENTION

[0003] The present invention relates to antibodies directed to epitopes of Human Immunodeficiency Virus (“HIV”). The present invention further relates to the preparation and use of broadly neutralizing antibodies directed to the HIV gp120 envelope protein for the prevention and treatment of HIV infection.

### BACKGROUND OF THE INVENTION

[0004] HIV causes Acquired Immunodeficiency Syndrome (“AIDS”). The immune response to HIV infection in long-term non-progressors suggests that specific viral immunity may limit infection and the symptoms of disease. Some HIV infected individuals show broadly neutralizing IgG antibodies in their serum; little is known regarding the specificity and activity of these antibodies, despite their potential importance in designing effective vaccines, and no single characteristic has of yet been correlated with protective immunity. In animal models, passive transfer of neutralizing antibodies can contribute to protection against virus challenge. Neutralizing antibody responses also can be developed in HIV-infected individuals but the detailed composition of the serologic response is yet to be fully uncovered.

[0005] A number of immunologic abnormalities have been described in AIDS. These include, but are not limited to, abnormalities in B-cell function, abnormal antibody response, defective monocyte cell function, impaired cytokine production, depressed natural killer and cytotoxic cell function, defective ability of lymphocytes to recognize and respond to soluble antigens, and the depletion of the T4 helper/inducer lymphocyte population.

[0006] The amino acid and RNA sequences encoding HIV env from a number of HIV strains are known (Modrow, S. et al., J. Virology 61(2): 570 (1987)). The HIV virion is covered by a membrane or envelope derived from the outer membrane of host cells. This membrane contains a population of envelope glycoproteins (gp 160) anchored in the membrane bilayer at their carboxyl terminal region. Each glycoprotein contains two segments: the N-terminal segment, and the C-terminal segment. The N-terminal segment, called gp 120 by virtue of its relative molecular weight of about 120 kD, protrudes into the aqueous environment surrounding the virion. The C-terminal segment, called gp41, spans the membrane. The N-terminal gp120 and the C-terminal gp41 are covalently linked by a peptide bond that is particularly susceptible to proteolytic cleavage. See European Patent Application Publication No. 0 335 635 to McCune et al and the references cited therein, each incorporated herein by reference in its entirety.

[0007] Several approaches to an AIDS vaccine have been proposed, including, but not limited to, inactivated and attenuated virus vaccines, subunit vaccines from virus-infected cells, recombinantly produced viral antigens, vaccines based on synthetic peptides, anti-idiotypic vaccines, and viral carrier-based vaccines. An additional approach to HIV therapeutic and prophylactic treatment includes making highly potent, broadly neutralizing monoclonal antibodies. Multiple studies have reported cloning and making monoclonal antibodies by various techniques for targeting the CD4 binding site as well as other parts of the virion spike and for neutralizing HIV. Generally, these techniques involve self-fusion or phage display techniques. Typically, in making HIV neutralizing antibodies using phage display techniques, random combinations of heavy and light chains are combined and a random pair is selected. Studies have reported a limited number of monoclonal antibodies, such as, for example, the phage display antibody b12, that are broadly highly potent, and broadly neutralizing (meaning antibodies that can neutralize multiple strains of HIV in sera) against HIV. The monoclonal antibody b12 is a broadly neutralizing antibody which has been reported to prevent HIV infection in macaques. Another broadly neutralizing antibody includes 2G12, which, atypically, has a structure which has yet to be seen in any other antibody with three combining sites. VRC01 is recently discovered broadly neutralizing antibody that targets the CD4 binding site (CD4bs) on the HIV spike. VRC01 was isolated by purifying single B cells that bind to a soluble, biotin labeled, stabilized, and re-surfaced core fragment of HIV gp120 (X. Wu et al., Science 329, 856 (Aug. 13, 2010)). Although successful, the isolation was inefficient, producing only 3 closely related HIV-binding antibodies from 25 million peripheral blood mononuclear cells from one individual. Like other anti-HIV antibodies obtained by the single cell antigen capture method, VRC01-3 showed very high levels of somatic mutations that were essential for potency and breadth. This high frequency of mutation is a potential impediment to antibody cloning because the mutated sequences may no longer be complementary to the primers used for cloning.

[0008] Some studies have reported that certain patients develop antibodies to HIV that are broadly neutralizing. Studies have reported that antibodies can be protective against initial HIV infection in passive transfer experiments in non-human primates and can modulate viral load during infection. See, for example, Mascola, 2000; Shibata, 1999; Veazey, 2003; Parren, 2001; Mascola, 1999; Trkola, 2005; Wei, 2003; Frost, 2005; Burton, 2004; Mascola, 2007; Karlsson Hedestam, 2008; McMichael, 2006; Zolla-Pazner, 2004.

### BRIEF SUMMARY OF THE INVENTION

[0009] The present invention, in one embodiment, provides broadly neutralizing antibodies against HIV. In one embodiment, the present invention provides an isolated HIV antibody comprising a heavy chain comprising the consensus amino acid sequence: QXXLXQSGGXVKKPGXSVXVSCXASGYXXFXXYXIHWXRQAPGXGXXWVGXI XPRXGXXXXAXXFQGRLSLTRDXXXXXXTXXXFMDLXGLRXDDTAVYFCARX XXXXXXXXXXXXXXXXXDX (SEQ ID NO:1) wherein X indicates any amino acid or no amino acid.

[0010] In another embodiment, the present invention provides an isolated HIV antibody comprising a light chain comprising the consensus amino sequence: EIXLTQSPXSLSXSXGEXXTISCXXXQXXXXXXXLXWYQQRXGXARPLLIXXXSX XXXGVPXRFSGXXXGXXYXLXISXLXXDDXAXYFCXXYEXXXXXXX (SEQ ID NO:2) wherein X indicates any amino acid or no amino acid.

[0011] In another embodiment, the present invention provides an isolated HIV antibody comprising a heavy chain comprising a highly conserved consensus sequence and a light chain comprising a highly conserved consensus sequence. The present invention further provides a method of producing an isolated HIV antibody comprising a heavy chain comprising a highly conserved consensus sequence and a light chain comprising a highly conserved consensus sequence.

[0012] In another embodiment, the present invention provides an isolated HIV antibody comprising the heavy chain consensus sequence of SEQ ID NO:1 and the light chain sequence of SEQ ID NO:2. In a further embodiment, the present invention provides an isolated HIV antibody comprising one or both of the heavy chain consensus sequence of SEQ ID NO:1 and the light chain sequence of SEQ ID NO:2, or sequences having at least 70%, or at least 80%, or at least 85%, or at least 90%, or at least 95%, or at least 97%, or at least 98%, or at least 99% identity thereto, with the proviso that the antibody does not have the amino acid sequence of VRC01.

[0013] In another embodiment, the present invention provides an isolated HIV antibody comprising one or both of the heavy chain consensus sequence of SEQ ID NO:1 and the light chain consensus sequence of SEQ ID NO:2 and wherein the antibody neutralizes HIV virus ZM53M.PB12 at an IC₅₀ concentration of less than 1.0 μg/ml, or HIV virus R1166.c1 at an IC₅₀ concentration of less than 1.0 μg/ml, or DU172.17 at an IC₅₀ concentration of less than 30 μg/ml. In another embodiment, the present invention provides an isolated HIV antibody comprising one or both of the heavy chain consensus sequence of SEQ ID NO:1 and the light chain consensus sequence of SEQ ID NO:2, wherein the antibody neutralizes a VRC01-resistant HIV virus at an IC₅₀ concentration of less than 30 μg/ml.

[0014] In another embodiment, the present invention provides an isolated HIV antibody selected from the group consisting of 3BNC117, 3BNC60, 12A12, 12A21, NIH45-46, 8ANC131, 8ANC134, IB2530, INC9 and 8ANC196.

[0015] In another embodiment, the present invention provides an isolated HIV antibody comprising heavy chain CDR1, CDR2 and CDR3 regions and light chain CDR1, CDR2 and CDR3 regions comprising the amino acid sequences of the corresponding regions of an HIV antibody selected from the group consisting of 3BNC117, 3BNC60, 12A12, 12A21, NIH45-46, bANC131, 8ANC134, IB2530, INC9 and 8ANC196.

[0016] In another embodiment, the present invention provides an isolated HIV antibody comprising a heavy chain comprising an amino acid sequence selected from the group consisting of SEQ ID NOs: 5-438.

[0017] In another embodiment, the present invention provides an isolated HIV antibody comprising a light chain comprising an amino acid sequence selected from the group consisting of SEQ ID NOs: 439-583.

[0018] In another embodiment, the present invention provides an isolated HIV antibody comprising a heavy chain and a light chain comprising an amino acid sequence set forth in Table A or Table B.

[0019] In another embodiment, the present invention provides an isolated HIV antibody comprising an insertion sequence comprising the amino acid sequence: ASWDFDF (SEQ ID NO:3).

[0020] In another embodiment, the present invention provides an isolated HIV antibody comprising an insertion sequence comprising the amino acid sequence: TARDY (SEQ ID NO:4).

[0021] In another embodiment, the present invention provides an isolated HIV antibody comprising insertion sequences SEQ ID No: 3 and SEQ ID No: 4.

[0022] In another embodiment, the present invention provides a method to improve the HIV neutralization potency and breadth of an isolated HIV antibody comprising inserting at least one of insertion sequences SEQ ID No: 3 and SEQ ID No: 4.

[0023] According to another embodiment, the present invention provides compositions comprising an isolated HIV antibody of the invention.

[0024] According to another embodiment, the present invention provides pharmaceutical compositions comprising an antibody of the invention and a pharmaceutically acceptable carrier.

[0025] According to another embodiment, the present invention provides nucleic acid molecules encoding an isolated HIV antibody of the invention.

[0026] According to other embodiments, the present invention provides vectors comprising nucleic acid molecules encoding an isolated HIV antibody of the invention, and cells comprising such vectors.

[0027] According to another embodiment, the present invention provides a method of preventing or treating HIV infection or an HIV-related disease comprising the steps of: identifying a mammalian subject in need of such prevention or treatment, and administering to said subject a therapeutically effective amount of at least one HIV antibody of the invention.

[0028] According to another embodiment, the method further comprises the administration of a second therapeutic agent. According to another embodiment, the second therapeutic agent is an antiviral agent.

[0029] Another embodiment of the present invention provides a method of reducing virus replication or spread of infection to additional host cells or tissues comprising contacting a mammalian cell with at least one antibody of the invention. According to another aspect, the present invention provides for a method for treating a mammalian subject infected with HIV, the method comprising administering to said subject a pharmaceutical composition comprising at least one antibody according to the invention.

[0030] According to another embodiment, the present invention provides a method for the preparation and administration of an HIV antibody preparation which is suitable for administration to a mammalian subject having or at risk of HIV infection, in an amount and according to a schedule sufficient to induce a protective immune response against HIV or reduction of the HIV virus in a mammalian subject. In another embodiment, the present invention provides a method for detecting an HIV antibody comprising a heavy chain comprising a highly conserved consensus sequence and a light chain comprising a highly conserved consensus sequence in a biological sample.

[0031] In another embodiment, the present invention provides the isolated antibodies of the invention for use in the treatment of HIV.

[0032] In another embodiment, the present invention provides a kit comprising a pharmaceutically acceptable dose unit of a pharmaceutically effective amount of at isolated HIV antibody of the invention, and a pharmaceutically acceptable dose unit of a pharmaceutically effective amount of an HIV agent selected from the group consisting of a non-nucleoside reverse transcriptase inhibitor, a protease inhibitor, a entry or fusion inhibitor and an integrase inhibitors, wherein the two pharmaceutically acceptable dose units can optionally take the form of a single pharmaceutically acceptable dose unit.

[0033] In another embodiment, the present invention provides a kit for the diagnosis, prognosis or monitoring the treatment of HIV in a subject comprising one or more detection reagents which specifically bind to anti-HIV neutralizing antibodies in a biological sample from a subject. In another aspect of the invention, the kit further provides reagents for performing PCR or mass spectrometry.

### BRIEF DESCRIPTION OF THE DRAWINGS

[0034] FIGS. 1A-D show the HIV antibody neutralizing activity IC₅₀. (A) Limited panel. Top line indicates the donor number, then clone or antibody (Table 4); viruses are shown on the left. Colors indicate concentration at IC₅₀: red≦0.1 μg/ml; orange 0.1-1 μg/ml; yellow 1-10 μg/ml; green≦10 μg/ml; white not neutralized at any concentration tested. (B) Extended panel. (C) Neutralization summary graph comparing VRC01, NIH45-46, 3BNC117. Length of lines and size of circles inversely proportional to IC₅₀. Colors indicate viral clades: red A; blue B; green C; fucia D; black AE; gold AG. (D) Sequence of 3BNC60, 1B2530 and 8ANC134 heavy chains with coverage by peptides found by Mass Spec in light grey. Red dots indicate differences from respective germline sequences.

[0035] FIGS. 2A-C show the binding properties of the HIV antibodies. (A) Representive SPR sensograms for binding to YU2-gp140 and 2CC-core by 12A12, 12A21 and 12A-germline (GL) reverted antibodies. (B) Graph shows K_{A} for representative antibodies. (C) Graph shows mean fluorescence intensity of anti-CD4i antibody binding to Ba1.26 expressing 293T cells after incubation with the indicated antibodies. Table indicates whether or not an antibody induces CD4i site accessibility.

[0036] FIGS. 3A and B show the HIV antibody consensus sequence, and HIV antibody amino acid sequences. (A) Amino acid alignment relative to framework (FR) and CDR regions for consensus, germline genes, 10 selected antibodies and 8ANC195. Residues are numbered according to the 3BNC60 structure. (B) As in (A) for light chains. (C, D, and E) Crystal structure of 3BNC60 Fab.

[0037] FIGS. 4A and B show recovery of highly mutated immunoglobulin heavy chains with specific primers. (A) side by side comparison of new and old primer set. Red boxes indicate successful amplification of IgV_{H} genes. (B) HIV antibodies that bind to 2CC-core from Pt 8. Clonal families are shown by differently expanded slices. Two highly mutated clones that were not amplified with the old primer set are shown in striped pie slices.

[0038] FIG. 5 shows Ig V heavy (A) and light chain (B) sequences of new VRC01 clonal members.

[0039] FIG. 6 shows patient serum neutralizing activity. (A) Table summarizes purified serum IgG neutralizing activity against a panel of Tier 2 viruses in a Tzm-b1 assay. Dark red boxes indicate IC₅₀ values below 10 μg/ml, orange between 10 and 100 μg/ml and yellow above 100 μg/ml. (B) dot plot summarizes the IC₅₀ values shown in A for the 4 more extensively tested patients.

[0040] FIG. 7 demonstrates detection of antibodies by mass spectrometry. Collision activated dissociation MS/MS spectrum recorded on the doubly charged peptides HSDYCDFDVWGSGSQVIVSSASTK from 3BNC153HC (A) and DGLGEVAPAYLYGIDAWGQGTTVIVTSASTK from 8ANC134HC. (B. Observed b-type fragment ions (containing the N-terminus) and y-type fragment ions (containing the C-terminus) are labeled in the spectrum. Loss of water from fragment ions is indicated by *. Ions corresponding to the loss of water from the parent ion are labeled in the spectrum. Observed backbone cleavages are indicated in the sequence with ┐ for b-type ions and ┘ for y type ions.

[0041] FIGS. 8A and B demonstrate affinity of HIV antibodies. (A) Antibody binding to gp140 and 2CC-core measured by surface plasmon resonance (SPR). The SPR sensograms for antibody binding of the selected 3BNC-antibody clones are shown over time. (B) Bar graphs show the binding affinity (K_{A}) for gp140 and 2CC-core antigens for the selected IgG antibodies shown in A. RU, response units.

[0042] FIGS. 9A-C illustrate the somatic hypermutation analysis of selected HIV antibodies for (A) immunoglobulin heavy chain gene, (B) light chain kappa and (C) light chain lambda gene sequences. Sequences are aligned with their respective germline nucleotide sequences. Somatic mutations are shown in red letters, additionally gray boxes designate replacement mutations. Germline amino acid sequences with * indicating consensus residues are shown above the nucleotide alignment.

[0043] FIGS. 10 A-C shows antibody sequences from one expanded neutralizing clone in each (A) Patient (Pt)1, (B) Pt3 and (C) Pt8. Peptides identified by mass spectrometry are indicated in color. The variants marked with an asterisk are uniquely defined by one or more mass spectrometrically observed peptides (shown in light grey). The remaining mass spectrometrically observed peptides map non-uniquely to multiple variants as shown in dark grey. Underlined amino acids indicate non-tryptic cleavage sites in the variants shown. The cleavages are presumed to occur through chymotryptic cleavage or additional mutations (not observed among the cloned variants) that place a lysine or arginine residue at these sites.

### DETAILED DESCRIPTION OF THE INVENTION

### I. HIV Neutralizing Antibodies

[0044] The present invention, in one embodiment, provides broadly neutralizing antibodies against HIV. In one embodiment, the present invention provides an isolated HIV antibody comprising a heavy chain comprising the consensus amino acid sequence: QXXLXQSGGXVKKPGXSVXVSCXASGYXXFXXYXIHWXRQAPGXGXXWVGXI XPRXGXXXXAXXFQGRLSLTRDXXXXXXTXXXFMDLXGLRXDDTAVYFCARX XXXXXXXXXXXXXXXXXDX (SEQ ID NO:1) wherein X indicates any amino acid or no amino acid.

[0045] In another embodiment, the present invention provides an isolated HIV antibody comprising a light chain comprising the consensus amino sequence: EIXLTQSPXSLSXSXGEXXTISCXXXQXXXXXXXLXWYQQRXGXARPLLIXXXSX XXXGVPXRFSGXXXGXXYXLXISXLXXDDXAXYFCXXYEXXXXXXX (SEQ ID NO:2) wherein X indicates any amino acid or no amino acid.

[0046] In another embodiment, the present invention provides an isolated HIV antibody comprising the heavy chain sequence of SEQ ID NO:1 and the light chain sequence of SEQ ID NO:2. In a further embodiment, the present invention provides an isolated HIV antibody comprising one or both of the heavy chain sequence of SEQ ID NO:1 and the light chain sequence of SEQ ID NO:2, or sequences having at least 70%, or at least 80%, or at least 85%, or at least 90%, or at least 95%, or at least 97%, or at least 98%, or at least 99% identity thereto, with the proviso that the antibody does not have the amino acid sequence of VRC01. Percentage identity is determined as disclosed hereinbelow.

[0047] The present invention provides, in other embodiments, an isolated HIV antibody comprising a heavy chain comprising an highly conserved heavy chain amino acid sequence and a light chain comprising a highly conserved light chain amino acid sequence. A highly conserved heavy chain amino acid sequence is defined herein as an amino acid sequence having at least 70%, or at least 80%, or at least 85%, or at least 90%, or at least 95%, or at least 97%, or at least 98%, or at least 99% identity with the sequence of SEQ ID NO:1. A highly conserved light chain amino acid sequence is defined herein as an amino acid sequence having at least 70%, or at least 80%, or at least 85%, or at least 90%, or at least 95%, or at least 97%, or at least 98%, or at least 99% identity with the sequence of SEQ ID NO:2. Percentage identity is determined as disclosed hereinbelow.

[0048] In another embodiment, present invention provides an isolated HIV antibody comprising a heavy chain comprising an highly conserved heavy chain amino acid sequence and a light chain comprising a highly conserved light chain amino acid sequence, with the proviso that the antibody does not have the sequence of VRC01.

[0049] In another embodiment, the present invention provides an isolated HIV antibody comprising one or both of the heavy chain sequence of SEQ ID NO:1 and the light chain sequence of SEQ ID NO:2 and wherein the antibody neutralizes HIV virus ZM53M.PB12 at an IC₅₀ concentration of less than 1.0 μg/ml, or HIV virus R1166.c1 at an IC₅₀ concentration of less than 1.0 μg/ml, or DU172.17 at an IC₅₀ concentration of less than 30 μg/ml. In another embodiment, the present invention provides an isolated HIV antibody comprising one or both of the heavy chain sequence of SEQ ID NO:1 and the light chain sequence of SEQ ID NO:2, wherein the antibody neutralizes a VRC01-resistant HIV virus at an IC₅₀ concentration of less than 30 μg/ml. A VRC01-resistant HIV virus is defined herein as an HIV virus that is resistant to neutralization by VRC01 at an IC₅₀ value of 50 μg/ml. VRC01-resistant HIV viruses include, for example, HO86.8, DU172.17, 250-4, 278-50, and 620345.c1.

[0050] In another embodiment, the present invention provides an isolated HIV antibody selected from the group consisting of 3BNC117, 3BNC60, 12A12, 12A21, NIH45-46, bANC131, 8ANC134, IB2530, INC9 and 8ANC196.

[0051] In another embodiment, the present invention provides an isolated HIV antibody comprising heavy chain CDR1, CDR2 and CDR3 regions and light chain CDR1, CDR2 and CDR3 regions comprising the amino acids sequences of the corresponding regions of an HIV antibody selected from the group consisting of 3BNC117, 3BNC60, 12A12, 12A21, NIH45-46, bANC131, 8ANC134, IB2530, INC9 and 8ANC196.

[0052] In another embodiment, the present invention provides an isolated HIV antibody comprising a heavy chain comprising an amino acid sequence selected from the group consisting of SEQ ID NOs: 5-438.

[0053] In another embodiment, the present invention provides an isolated HIV antibody comprising a light chain comprising an amino acid sequence selected from the group consisting of SEQ ID NOs: 439-583.

[0054] In another embodiment, the present invention provides an isolated HIV antibody comprising a heavy chain and a light chain comprising an amino acid sequence set forth in Table A or Table B.

[0055] In another embodiment, the present invention provides an isolated HIV antibody comprising an insertion sequence comprising the amino acid sequence: ASWDFDF (SEQ ID NO:3). In a further embodiment, the present invention provides an isolated HIV antibody wherein insertion sequence SEQ ID No: 3, which corresponds to the FR3 region of the heavy chain commencing at amino acid 74 of 3BNC117 and 3BNC60 as shown in FIG. 5A, is substituted for the corresponding region, as determined by sequence alignment, of an HIV antibody of the invention. For example, SEQ ID No: 3 may be inserted after the seventh amino acid of FR3 of the heavy chain.

[0056] In another embodiment, the present invention provides an isolated HIV antibody comprising an insertion sequence comprising the amino acid sequence: TARDY (SEQ ID NO:4). In a further embodiment, the present invention provides an isolated HIV antibody wherein insertion sequence SEQ ID No: 4, which corresponds to the CDR3 region of the heavy chain commencing at amino acid 103 of NIH45-46 as shown in FIG. 5A, is substituted for the corresponding region, as determined by sequence alignment, of an HIV antibody of the invention. For example, SEQ ID No: 4 may be inserted after the fourth amino acid of CDR3 of the heavy chain.

[0057] In another embodiment, the present invention provides an isolated HIV antibody wherein insertion sequence SEQ ID No: 3, which corresponds to the FR3 region of the heavy chain commencing at amino acid 74 of 3BNC117 and 3BNC60 as shown in FIG. 5A, is substituted for the corresponding region, as determined by sequence alignment, of an HIV antibody of the invention, and insertion sequence SEQ ID No: 4, which corresponds to the CDR3 region of the heavy chain commencing at amino acid 103 of NIH45-46 as shown in FIG. 5A, is substituted for the corresponding region, as determined by sequence alignment, of an HIV antibody of the invention. For example, SEQ ID No: 3 may be inserted after the seventh amino acid of FR3 of the heavy chain and SEQ ID No: 4 may be inserted after the fourth amino acid of CDR3 of the heavy chain.

[0058] In a further embodiment, the present invention provides a method to improve the HIV neutralization potency and breadth of an isolated HIV antibody comprising making an isolated HIV antibody wherein insertion sequence SEQ ID No: 3, which corresponds to the FR3 region of the heavy commencing at amino acid 74 of 3BNC117 and 3BNC60 as shown in FIG. 5A, is substituted for the corresponding region, as determined by sequence alignment, of an HIV antibody of the invention and/or the insertion sequence SEQ ID No: 4, which corresponds to the CDR3 region of the heavy chain commencing at amino acid 103 of NIH45-46 as shown in FIG. 5A, is substituted for the corresponding region, as determined by sequence alignment, of an HIV antibody of the invention. For example, SEQ ID No: 3 may be inserted after the seventh amino acid of FR3 of the heavy chain, and/or SEQ ID No: 4 may be inserted after the fourth amino acid of CDR3 of the heavy chain. One skilled in this art can modify the amino acid sequence of an antibody utilizing recombinant methods and/or synthetic chemistry techniques for the production of a polypeptide or an antibody. Also, one skilled in the art can identify an improved HIV antibody with greater neutralization potency and breadth by using a HIV neutralization assay, as described below.

[0059] In another embodiment, the present invention provides an improved isolated HIV antibody comprising at least one of insertion sequences SEQ ID NO: 3 and SEQ ID NO: 4, wherein the improved isolated HIV antibody has greater HIV neutralization potency and breadth, than said isolated HIV antibody without insertion sequences SEQ ID NO: 3 and SEQ ID NO: 4. One skilled in the art can identify the improved HIV antibody with greater HIV neutralization potency and breadth by using the HIV neutralization assay, as described below.

[0060] One skilled in this art can modify the amino acid sequence of an antibody utilizing recombinant methods and/or synthetic chemistry techniques for the production of a polypeptide or an antibody.

[0061] In another embodiment, the present invention provides for a method to make an isolated HIV antibody comprising the heavy chain consensus sequence of SEQ ID NO:1 and the light chain sequence of SEQ ID NO:2. In a further embodiment, the present invention provides for a method of producing an isolated HIV antibody comprising one or both of the heavy chain consensus sequence of SEQ ID NO:1 and the light chain sequence of SEQ ID NO:2, or sequences having at least 70%, or at least 80%, or at least 85%, or at least 90%, or at least 95%, or at least 97%, or at least 98%, or at least 99% identity thereto, with the proviso that the antibody does not have the amino acid sequence of VRC01. Percentage identity is determined as disclosed hereinbelow.

[0062] In another embodiment, the present invention provides a method for detecting an isolated HIV antibody comprising obtaining an immunoglobulin-containing biological sample from a mammalian subject, isolating an HIV antibody from said sample, determining the amino sequence of the HIV antibody and identifying the presence of the heavy chain sequence of SEQ ID NO:1 and the light chain sequence of SEQ ID NO:2. In a further embodiment, the present invention provides for a method of selecting an isolated HIV antibody comprising determining the presence of one or both of the heavy chain consensus sequence of SEQ ID NO:1 and the light chain sequence of SEQ ID NO:2, or sequences having at least 70%, or at least 80%, or at least 85%, or at least 90%, or at least 95%, or at least 97%, or at least 98%, or at least 99% identity thereto, with the proviso that the antibody does not have the amino acid sequence of VRC01. Percentage identity is determined as disclosed herein below. The biological sample may be blood, serum, saliva, urine, sputum, a cell swab sample, or a tissue biopsy. The amino acid sequences may be determined by methods known in the art including, for example, PCR and mass spectrometry.

[0063] The term “antibody” (Ab) as used herein includes monoclonal antibodies, polyclonal antibodies, multispecific antibodies (for example, bispecific antibodies and polyreactive antibodies), and antibody fragments. Thus, the term “antibody” as used in any context within this specification is meant to include, but not be limited to, any specific binding member, immunoglobulin class and/or isotype (e.g., IgG1, IgG2, IgG3, IgG4, IgM, IgA, IgD, IgE and IgM); and biologically relevant fragment or specific binding member thereof, including but not limited to Fab, F(ab′)2, Fv, and scFv (single chain or related entity). It is understood in the art that an antibody is a glycoprotein comprising at least two heavy (H) chains and two light (L) chains inter-connected by disulfide bonds, or an antigen binding portion thereof. A heavy chain is comprised of a heavy chain variable region (VH) and a heavy chain constant region (CH1, CH2 and CH3). A light chain is comprised of a light chain variable region (VL) and a light chain constant region (CL). The variable regions of both the heavy and light chains comprise framework regions (FWR) and complementarity determining regions (CDR). The four FWR regions are relatively conserved while CDR regions (CDR1, CDR2 and CDR3) represent hypervariable regions and are arranged from NH2 terminus to the COOH terminus as follows: FWR1, CDR1, FWR2, CDR2, FWR3, CDR3, FWR4. The variable regions of the heavy and light chains contain a binding domain that interacts with an antigen while, depending of the isotype, the constant region(s) may mediate the binding of the immunoglobulin to host tissues or factors.

[0064] Also included in the definition of “antibody” as used herein are chimeric antibodies, humanized antibodies, and recombinant antibodies, human antibodies generated from a transgenic non-human animal, as well as antibodies selected from libraries using enrichment technologies available to the artisan.

[0065] The term “variable” refers to the fact that certain segments of the variable (V) domains differ extensively in sequence among antibodies. The V domain mediates antigen binding and defines specificity of a particular antibody for its particular antigen. However, the variability is not evenly distributed across the 110-amino acid span of the variable regions. Instead, the V regions consist of relatively invariant stretches called framework regions (FRs) of 15-30 amino acids separated by shorter regions of extreme variability called “hypervariable regions” that are each 9-12 amino acids long. The variable regions of native heavy and light chains each comprise four FRs, largely adopting a beta sheet configuration, connected by three hypervariable regions, which form loops connecting, and in some cases forming part of, the beta sheet structure. The hypervariable regions in each chain are held together in close proximity by the FRs and, with the hypervariable regions from the other chain, contribute to the formation of the antigen-binding site of antibodies (see, for example, Kabat et al., Sequences of Proteins of Immunological Interest, 5th Ed. Public Health Service, National Institutes of Health, Bethesda, Md. (1991)).

[0066] The term “hypervariable region” as used herein refers to the amino acid residues of an antibody that are responsible for antigen binding. The hypervariable region generally comprises amino acid residues from a “complementarity determining region” (“CDR”).

[0067] The term “monoclonal antibody” as used herein refers to an antibody obtained from a population of substantially homogeneous antibodies, i.e., the individual antibodies comprising the population are identical except for possible naturally occurring mutations that may be present in minor amounts. The term “polyclonal antibody” refers to preparations that include different antibodies directed against different determinants (“epitopes”).

[0068] The monoclonal antibodies herein include “chimeric” antibodies in which a portion of the heavy and/or light chain is identical with, or homologous to, corresponding sequences in antibodies derived from a particular species or belonging to a particular antibody class or subclass, while the remainder of the chain(s) is identical with, or homologous to, corresponding sequences in antibodies derived from another species or belonging to another antibody class or subclass, as well as fragments of such antibodies, so long as they exhibit the desired biological activity (see, for example, U.S. Pat. No. 4,816,567; and Morrison et al., Proc. Natl. Acad. Sci. USA, 81:6851-6855 (1984)). The described invention provides variable region antigen-binding sequences derived from human antibodies. Accordingly, chimeric antibodies of primary interest herein include antibodies having one or more human antigen binding sequences (for example, CDRs) and containing one or more sequences derived from a non-human antibody, for example, an FR or C region sequence. In addition, chimeric antibodies included herein are those comprising a human variable region antigen binding sequence of one antibody class or subclass and another sequence, for example, FR or C region sequence, derived from another antibody class or subclass.

[0069] A “humanized antibody” generally is considered to be a human antibody that has one or more amino acid residues introduced into it from a source that is non-human. These non-human amino acid residues often are referred to as “import” residues, which typically are taken from an “import” variable region. Humanization may be performed following the method of Winter and co-workers (see, for example, Jones et al., Nature, 321:522-525 (1986); Reichmann et al., Nature, 332:323-327 (1988); Verhoeyen et al., Science, 239:1534-1536 (1988)), by substituting import hypervariable region sequences for the corresponding sequences of a human antibody. Accordingly, such “humanized” antibodies are chimeric antibodies (see, for example, U.S. Pat. No. 4,816,567), wherein substantially less than an intact human variable region has been substituted by the corresponding sequence from a non-human species.

[0070] An “antibody fragment” comprises a portion of an intact antibody, such as the antigen binding or variable region of the intact antibody. Examples of antibody fragments include, but are not limited to, Fab, Fab′, F(ab′)2, and Fv fragments; diabodies; linear antibodies (see, for example, U.S. Pat. No. 5,641,870; Zapata et al., Protein Eng. 8(10): 1057-1062 [1995]); single-chain antibody molecules; and multispecific antibodies formed from antibody fragments.

[0071] “Fv” is the minimum antibody fragment that contains a complete antigen-recognition and antigen-binding site. This fragment contains a dimer of one heavy- and one light-chain variable region domain in tight, non-covalent association. From the folding of these two domains emanate six hypervariable loops (three loops each from the H and L chain) that contribute the amino acid residues for antigen binding and confer antigen binding specificity to the antibody. However, even a single variable region (or half of an Fv comprising only three CDRs specific for an antigen) has the ability to recognize and bind antigen, although at a lower affinity than the entire binding site.

[0072] “Single-chain Fv” (“sFv” or “scFv”) are antibody fragments that comprise the VH and VL antibody domains connected into a single polypeptide chain. The sFv polypeptide can further comprise a polypeptide linker between the VH and VL domains that enables the sFv to form the desired structure for antigen binding. For a review of sFv, see, for example, Pluckthun in The Pharmacology of Monoclonal Antibodies, vol. 113, Rosenburg and Moore eds., Springer-Verlag, New York, pp. 269-315 (1994); Borrebaeck 1995, infra.

[0073] The term “diabodies” refers to small antibody fragments prepared by constructing sFv fragments with short linkers (about 5-10 residues) between the VH and VL domains such that inter-chain but not intra-chain pairing of the V domains is achieved, resulting in a bivalent fragment, i.e., fragment having two antigen-binding sites. Bispecific diabodies are heterodimers of two “crossover” sFv fragments in which the VH and VL domains of the two antibodies are present on different polypeptide chains. Diabodies are described more fully in, for example, EP 404,097; WO 93/11161; and Hollinger et al., Proc. Natl. Acad. Sci. USA, 90:6444-6448 (1993).

[0074] Domain antibodies (dAbs), which can be produced in fully human form, are the smallest known antigen-binding fragments of antibodies, ranging from about 11 kDa to about 15 kDa. dAbs are the robust variable regions of the heavy and light chains of immunoglobulins (VH and VL, respectively). They are highly expressed in microbial cell culture, show favorable biophysical properties including, for example, but not limited to, solubility and temperature stability, and are well suited to selection and affinity maturation by in vitro selection systems such as, for example, phage display. dAbs are bioactive as monomers and, owing to their small size and inherent stability, can be formatted into larger molecules to create drugs with prolonged serum half-lives or other pharmacological activities. Examples of this technology have been described in, for example, WO9425591 for antibodies derived from Camelidae heavy chain Ig, as well in US20030130496 describing the isolation of single domain fully human antibodies from phage libraries.

[0075] Fv and sFv are the only species with intact combining sites that are devoid of constant regions. Thus, they are suitable for reduced nonspecific binding during in vivo use. sFv fusion proteins can be constructed to yield fusion of an effector protein at either the amino or the carboxy terminus of an sFv. See, for example, Antibody Engineering, ed. Borrebaeck, supra. The antibody fragment also can be a “linear antibody”, for example, as described in U.S. Pat. No. 5,641,870 for example. Such linear antibody fragments can be monospecific or bispecific.

[0076] In certain embodiments, antibodies of the described invention are bispecific or multi-specific. Bispecific antibodies are antibodies that have binding specificities for at least two different epitopes. Exemplary bispecific antibodies can bind to two different epitopes of a single antigen. Other such antibodies can combine a first antigen binding site with a binding site for a second antigen. Alternatively, an anti-HIV arm can be combined with an arm that binds to a triggering molecule on a leukocyte, such as a T-cell receptor molecule (for example, CD3), or Fc receptors for IgG (Fc gamma R), such as Fc gamma RI (CD64), Fc gamma RII (CD32) and Fc gamma RIII (CD16), so as to focus and localize cellular defense mechanisms to the infected cell. Bispecific antibodies also can be used to localize cytotoxic agents to infected cells. Bispecific antibodies can be prepared as full length antibodies or antibody fragments (for example, F(ab′)2 bispecific antibodies). For example, WO 96/16673 describes a bispecific anti-ErbB2/anti-Fc gamma RIII antibody and U.S. Pat. No. 5,837,234 discloses a bispecific anti-ErbB2/anti-Fc gamma RI antibody. For example, a bispecific anti-ErbB2/Fc alpha antibody is reported in WO98/02463; U.S. Pat. No. 5,821,337 teaches a bispecific anti-ErbB2/anti-CD3 antibody. See also, for example, Mouquet et al., Polyreactivity Increases The Apparent Affinity Of Anti-HIV Antibodies By Heteroligation. NATURE. 467, 591-5 (2010).

[0077] Methods for making bispecific antibodies are known in the art. Traditional production of full length bispecific antibodies is based on the co-expression of two immunoglobulin heavy chain-light chain pairs, where the two chains have different specificities (see, for example, Millstein et al., Nature, 305:537-539 (1983)). Similar procedures are disclosed in, for example, WO 93/08829, Traunecker et al., EMBO J., 10:3655-3659 (1991) and see also; Mouquet et al., Polyreactivity Increases The Apparent Affinity Of Anti-HIV Antibodies By Heteroligation. NATURE. 467, 591-5 (2010).

[0078] Alternatively, antibody variable regions with the desired binding specificities (antibody-antigen combining sites) are fused to immunoglobulin constant domain sequences. The fusion is with an Ig heavy chain constant domain, comprising at least part of the hinge, CH2, and CH3 regions. According to some embodiments, the first heavy-chain constant region (CH1) containing the site necessary for light chain bonding, is present in at least one of the fusions. DNAs encoding the immunoglobulin heavy chain fusions and, if desired, the immunoglobulin light chain, are inserted into separate expression vectors, and are co-transfected into a suitable host cell. This provides for greater flexibility in adjusting the mutual proportions of the three polypeptide fragments in embodiments when unequal ratios of the three polypeptide chains used in the construction provide the optimum yield of the desired bispecific antibody. It is, however, possible to insert the coding sequences for two or all three polypeptide chains into a single expression vector when the expression of at least two polypeptide chains in equal ratios results in high yields or when the ratios have no significant affect on the yield of the desired chain combination.

[0079] Techniques for generating bispecific antibodies from antibody fragments also have been described in the literature. For example, bispecific antibodies can be prepared using chemical linkage. For example, Brennan et al., Science, 229: 81 (1985) describe a procedure wherein intact antibodies are proteolytically cleaved to generate F(ab′)2 fragments. These fragments are reduced in the presence of the dithiol complexing agent, sodium arsenite, to stabilize vicinal dithiols and prevent intermolecular disulfide formation. The Fab′ fragments generated then are converted to thionitrobenzoate (TNB) derivatives. One of the Fab′-TNB derivatives then is reconverted to the Fab′-thiol by reduction with mercaptoethylamine and is mixed with an equimolar amount of the other Fab′-TNB derivative to form the bispecific antibody. The bispecific antibodies produced can be used as agents for the selective immobilization of enzymes.

[0080] Other modifications of the antibody are contemplated herein. For example, the antibody can be linked to one of a variety of nonproteinaceous polymers, for example, polyethylene glycol, polypropylene glycol, polyoxyalkylenes, or copolymers of polyethylene glycol and polypropylene glycol. The antibody also can be entrapped in microcapsules prepared, for example, by coacervation techniques or by interfacial polymerization (for example, hydroxymethylcellulose or gelatin-microcapsules and poly-(methylmethacylate)microcapsules, respectively), in colloidal drug delivery systems (for example, liposomes, albumin microspheres, microemulsions, nano-particles and nanocapsules), or in macroemulsions. Such techniques are disclosed in, for example, Remington's Pharmaceutical Sciences, 16th edition, Oslo, A., Ed., (1980).

[0081] Typically, the antibodies of the described invention are produced recombinantly, using vectors and methods available in the art. Human antibodies also can be generated by in vitro activated B cells (see, for example, U.S. Pat. Nos. 5,567,610 and 5,229,275). General methods in molecular genetics and genetic engineering useful in the present invention are described in the current editions of Molecular Cloning: A Laboratory Manual (Sambrook, et al., 1989, Cold Spring Harbor Laboratory Press), Gene Expression Technology (Methods in Enzymology, Vol. 185, edited by D. Goeddel, 1991. Academic Press, San Diego, Calif.), “Guide to Protein Purification” in Methods in Enzymology (M. P. Deutshcer, ed., (1990) Academic Press, Inc.); PCR Protocols: A Guide to Methods and Applications (Innis, et al. 1990. Academic Press, San Diego, Calif.), Culture of Animal Cells: A Manual of Basic Technique, 2nd Ed. (R. I. Freshney. 1987. Liss, Inc. New York, N.Y.), and Gene Transfer and Expression Protocols, pp. 109-128, ed. E. J. Murray, The Humana Press Inc., Clifton, N.J.). Reagents, cloning vectors, and kits for genetic manipulation are available from commercial vendors such as BioRad, Stratagene, Invitrogen, ClonTech and Sigma-Aldrich Co.

[0082] Human antibodies also can be produced in transgenic animals (for example, mice) that are capable of producing a full repertoire of human antibodies in the absence of endogenous immunoglobulin production. For example, it has been described that the homozygous deletion of the antibody heavy-chain joining region (JH) gene in chimeric and germ-line mutant mice results in complete inhibition of endogenous antibody production. Transfer of the human germ-line immunoglobulin gene array into such germ-line mutant mice results in the production of human antibodies upon antigen challenge. See, for example, Jakobovits et al., Proc. Natl. Acad. Sci. USA, 90:2551 (1993); Jakobovits et al., Nature, 362:255-258 (1993); Bruggemann et al., Year in Immuno., 7:33 (1993); U.S. Pat. Nos. 5,545,806, 5,569,825, 5,591,669 (all of GenPharm); U.S. Pat. No. 5,545,807; and WO 97/17852. Such animals can be genetically engineered to produce human antibodies comprising a polypeptide of the described invention.

[0083] Various techniques have been developed for the production of antibody fragments. Traditionally, these fragments were derived via proteolytic digestion of intact antibodies (see, for example, Morimoto et al., Journal of Biochemical and Biophysical Methods 24:107-117 (1992); and Brennan et al., Science, 229:81 (1985)). However, these fragments can now be produced directly by recombinant host cells. Fab, Fv and ScFv antibody fragments can all be expressed in and secreted from E. coli, thus allowing the facile production of large amounts of these fragments. Fab′-SH fragments can be directly recovered from E. coli and chemically coupled to form F(ab′)2 fragments (see, for example, Carter et al., Bio/Technology 10:163-167 (1992)). According to another approach, F(ab′)2 fragments can be isolated directly from recombinant host cell culture. Fab and F(ab′)2 fragment with increased in vivo half-life comprising a salvage receptor binding epitope residues are described in U.S. Pat. No. 5,869,046. Other techniques for the production of antibody fragments will be apparent to the skilled practitioner.

[0084] Other techniques that are known in the art for the selection of antibody fragments from libraries using enrichment technologies, including but not limited to phage display, ribosome display (Hanes and Pluckthun, 1997, Proc. Nat. Acad. Sci. 94: 4937-4942), bacterial display (Georgiou, et al., 1997, Nature Biotechnology 15: 29-34) and/or yeast display (Kieke, et al., 1997, Protein Engineering 10: 1303-1310) may be utilized as alternatives to previously discussed technologies to select single chain antibodies. Single-chain antibodies are selected from a library of single chain antibodies produced directly utilizing filamentous phage technology. Phage display technology is known in the art (e.g., see technology from Cambridge Antibody Technology (CAT)) as disclosed in U.S. Pat. Nos. 5,565,332; 5,733,743; 5,871,907; 5,872,215; 5,885,793; 5,962,255; 6,140,471; 6,225,447; 6,291650; 6,492,160; 6,521,404; 6,544,731; 6,555,313; 6,582,915; 6,593,081, as well as other U.S. family members, or applications which rely on priority filing GB 9206318, filed 24 May 1992; see also Vaughn, et al. 1996, Nature Biotechnology 14: 309-314). Single chain antibodies may also be designed and constructed using available recombinant DNA technology, such as a DNA amplification method (e.g., PCR), or possibly by using a respective hybridoma cDNA as a template.

[0085] Variant antibodies also are included within the scope of the invention. Thus, variants of the sequences recited in the application also are included within the scope of the invention. Further variants of the antibody sequences having improved affinity can be obtained using methods known in the art and are included within the scope of the invention. For example, amino acid substitutions can be used to obtain antibodies with further improved affinity. Alternatively, codon optimization of the nucleotide sequence can be used to improve the efficiency of translation in expression systems for the production of the antibody.

[0086] Such variant antibody sequences will share 70% or more (i.e., 80%, 85%, 90%, 95%, 97%, 98%, 99% or greater) sequence identity with the sequences recited in the application. Such sequence identity is calculated with regard to the full length of the reference sequence (i.e., the sequence recited in the application). Percentage identity, as referred to herein, is as determined using BLAST version 2.1.3 using the default parameters specified by the NCBI (the National Center for Biotechnology Information; http://www.ncbi.nlm.nih.gov/) [Blosum 62 matrix; gap open penalty=11 and gap extension penalty=1]. For example, peptide sequences are provided by this invention that comprise at least about 5, 10, 15, 20, 30, 40, 50, 75, 100, 150, or more contiguous peptides of one or more of the sequences disclosed herein as well as all intermediate lengths there between. As used herein, the term “intermediate lengths” is meant to describe any length between the quoted values, such as 7, 8, 9, 10, 11, 12, 13, 14, 15, 16, 17, 18, 19, etc.; 21, 22, 23, etc.; 30, 31, 32, etc.; 50, 51, 52, 53, etc.; 100, 101, 102, 103, etc.; 150, 151, 152, 153, etc.

[0087] The present invention provides for antibodies, either alone or in combination with other antibodies, such as, but not limited to, VRC01 and PG9, that have broad neutralizing activity in serum.

[0088] According to another embodiment, the present invention provides methods for the preparation and administration of an HIV antibody composition that is suitable for administration to a human or non-human primate patient having HIV infection, or at risk of HIV infection, in an amount and according to a schedule sufficient to induce a protective immune response against HIV, or reduction of the HIV virus, in a human.

[0089] According to another embodiment, the present invention provides a vaccine comprising at least one antibody of the invention and a pharmaceutically acceptable carrier. According to one embodiment, the vaccine is a vaccine comprising at least one antibody described herein and a pharmaceutically acceptable carrier. The vaccine can include a plurality of the antibodies having the characteristics described herein in any combination and can further include antibodies neutralizing to HIV as are known in the art.

[0090] It is to be understood that compositions can be a single or a combination of antibodies disclosed herein, which can be the same or different, in order to prophylactically or therapeutically treat the progression of various subtypes of HIV infection after vaccination. Such combinations can be selected according to the desired immunity. When an antibody is administered to an animal or a human, it can be combined with one or more pharmaceutically acceptable carriers, excipients or adjuvants as are known to one of ordinary skilled in the art. The composition can further include broadly neutralizing antibodies known in the art, including but not limited to, VRC01, PG9 and b12.

[0091] Further, with respect to determining the effective level in a patient for treatment of HIV, in particular, suitable animal models are available and have been widely implemented for evaluating the in vivo efficacy against HIV of various gene therapy protocols (Sarver et al. (1993b), supra). These models include mice, monkeys and cats. Even though these animals are not naturally susceptible to HIV disease, chimeric mice models (for example, SCID, bg/nu/xid, NOD/SCID, SCID-hu, immunocompetent SCID-hu, bone marrow-ablated BALB/c) reconstituted with human peripheral blood mononuclear cells (PBMCs), lymph nodes, fetal liver/thymus or other tissues can be infected with lentiviral vector or HIV, and employed as models for HIV pathogenesis. Similarly, the simian immune deficiency virus (SIV)/monkey model can be employed, as can the feline immune deficiency virus (FIV)/cat model. The pharmaceutical composition can contain other pharmaceuticals, in conjunction with a vector according to the invention, when used to therapeutically treat AIDS. These other pharmaceuticals can be used in their traditional fashion (i.e., as antiviral agents to treat HIV infection). Examples of HIV agents include without limitation non-nucleoside reverse transcriptase inhibitors, protease inhibitors, entry or fusion inhibitors and integrase inhibitors

[0092] According to another embodiment, the present invention provides an antibody-based pharmaceutical composition comprising an effective amount of an isolated HIV antibody, or an affinity matured version, which provides a prophylactic or therapeutic treatment choice to reduce infection of the HIV virus. The antibody-based pharmaceutical composition of the present invention may be formulated by any number of strategies known in the art (e.g., see McGoff and Scher, 2000, Solution Formulation of Proteins/Peptides: In McNally, E. J., ed. Protein Formulation and Delivery. New York, N.Y.: Marcel Dekker; pp. 139-158; Akers and Defilippis, 2000, Peptides and Proteins as Parenteral Solutions. In: Pharmaceutical Formulation Development of Peptides and Proteins. Philadelphia, Pa.: Talyor and Francis; pp. 145-177; Akers, et al., 2002, Pharm. Biotechnol. 14:47-127). A pharmaceutically acceptable composition suitable for patient administration will contain an effective amount of the antibody in a formulation which both retains biological activity while also promoting maximal stability during storage within an acceptable temperature range. The pharmaceutical compositions can also include, depending on the formulation desired, pharmaceutically acceptable diluents, pharmaceutically acceptable carriers and/or pharmaceutically acceptable excipients, or any such vehicle commonly used to formulate pharmaceutical compositions for animal or human administration. The diluent is selected so as not to affect the biological activity of the combination. Examples of such diluents are distilled water, physiological phosphate-buffered saline, Ringer's solutions, dextrose solution, and Hank's solution. The amount of an excipient that is useful in the pharmaceutical composition or formulation of this invention is an amount that serves to uniformly distribute the antibody throughout the composition so that it can be uniformly dispersed when it is to be delivered to a subject in need thereof. It may serve to dilute the antibody to a concentration which provides the desired beneficial palliative or curative results while at the same time minimizing any adverse side effects that might occur from too high a concentration. It may also have a preservative effect. Thus, for the antibody having a high physiological activity, more of the excipient will be employed. On the other hand, for any active ingredient(s) that exhibit a lower physiological activity, a lesser quantity of the excipient will be employed.

[0093] The above described antibodies and antibody compositions or vaccine compositions, comprising at least one or a combination of the antibodies described herein, can be administered for the prophylactic and therapeutic treatment of HIV viral infection.

[0094] The present invention also relates to isolated polypeptides comprising the amino acid sequences of the light chains and heavy chains listed in Tables A,B and FIGS. 10 A-C; the consensus sequences for the heavy and light chains of SEQ ID NOs: 1 and 2; and insertion sequences SEQ ID NOs:3 and 4.

[0095] In other related embodiments, the invention provides polypeptide variants that encode the amino acid sequences of the HIV antibodies listed in Tables A,B and FIG. 10 A-C; the consensus sequences for the heavy and light chains of SEQ ID NOs: 1 and 2; and insertion sequences SEQ ID NOs:3 and 4. These polypeptide variants have at least 70%, at least 75%, at least 80%, at least 85%, at least 90%, at least 95%, at least 96%, at least 97%, at least 98%, or at least 99%, or greater, sequence identity compared to a polypeptide sequence of this invention, as determined using the methods described herein, (for example, BLAST analysis using standard parameters). One skilled in this art will recognize that these values can be appropriately adjusted to determine corresponding identity of proteins encoded by taking into amino acid similarity and the like.

[0096] The term “polypeptide” is used in its conventional meaning, i.e., as a sequence of amino acids. The polypeptides are not limited to a specific length of the product. Peptides, oligopeptides, and proteins are included within the definition of polypeptide, and such terms can be used interchangeably herein unless specifically indicated otherwise. This term also includes post-expression modifications of the polypeptide, for example, glycosylations, acetylations, phosphorylations and the like, as well as other modifications known in the art, both naturally occurring and non-naturally occurring. A polypeptide can be an entire protein, or a subsequence thereof. Particular polypeptides of interest in the context of this invention are amino acid subsequences comprising CDRs, VH and VL, being capable of binding an antigen or HIV-infected cell.

[0097] A polypeptide “variant,” as the term is used herein, is a polypeptide that typically differs from a polypeptide specifically disclosed herein in one or more substitutions, deletions, additions and/or insertions. Such variants can be naturally occurring or can be synthetically generated, for example, by modifying one or more of the above polypeptide sequences of the invention and evaluating one or more biological activities of the polypeptide as described herein and/or using any of a number of techniques well known in the art.

[0098] For example, certain amino acids can be substituted for other amino acids in a protein structure without appreciable loss of its ability to bind other polypeptides (for example, antigens) or cells. Since it is the binding capacity and nature of a protein that defines that protein's biological functional activity, certain amino acid sequence substitutions can be made in a protein sequence, and, accordingly, its underlying DNA coding sequence, whereby a protein with like properties is obtained. It is thus contemplated that various changes can be made in the peptide sequences of the disclosed compositions, or corresponding DNA sequences that encode said peptides without appreciable loss of their biological utility or activity.

[0099] In many instances, a polypeptide variant will contain one or more conservative substitutions. A “conservative substitution” is one in which an amino acid is substituted for another amino acid that has similar properties, such that one skilled in the art of peptide chemistry would expect the secondary structure and hydropathic nature of the polypeptide to be substantially unchanged.

[0100] Amino acid substitutions generally are based on the relative similarity of the amino acid side-chain substituents, for example, their hydrophobicity, hydrophilicity, charge, size, and the like. Exemplary substitutions that take various of the foregoing characteristics into consideration are well known to those of skill in the art and include: arginine and lysine; glutamate and aspartate; serine and threonine; glutamine and asparagine; and valine, leucine and isoleucine.

[0101] “Homology” or “sequence identity” refers to the percentage of residues in the polynucleotide or polypeptide sequence variant that are identical to the non-variant sequence after aligning the sequences and introducing gaps, if necessary, to achieve the maximum percent homology. In particular embodiments, polynucleotide and polypeptide variants have at least about 70%, at least about 75%, at least about 80%, at least about 90%, at least about 95%, at least about 98%, or at least about 99% polynucleotide or polypeptide homology with a polynucleotide or polypeptide described herein.

[0102] Such variant polypeptide sequences will share 70% or more (i.e. 80%, 85%, 90%, 95%, 97%, 98%, 99% or more) sequence identity with the sequences recited in the application. In additional embodiments, the described invention provides polypeptide fragments comprising various lengths of contiguous stretches of amino acid sequences disclosed herein. For example, peptide sequences are provided by this invention that comprise at least about 5, 10, 15, 20, 30, 40, 50, 75, 100, 150, or more contiguous peptides of one or more of the sequences disclosed herein as well as all intermediate lengths there between.

[0103] The invention also includes nucleic acid sequences encoding part or all of the light and heavy chains of the described inventive antibodies, and fragments thereof. Due to redundancy of the genetic code, variants of these sequences will exist that encode the same amino acid sequences.

[0104] The present invention also includes isolated nucleic acid sequences encoding the polypeptides for the heavy and light chains of the HIV antibodies listed in Tables A,B and FIG. 10 A-C; the consensus sequences for the heavy and light chains of SEQ ID NOs: 1 and 2; and insertion sequences SEQ ID NOs:3 and 4.

[0105] In other related embodiments, the described invention provides polynucleotide variants that encode the peptide sequences of the heavy and light chains of the HIV antibodies listed in Tables A,B and FIGS. 10 A-C; the consensus sequences for the heavy and light chains of SEQ ID NOs: 1 and 2; and insertion sequences SEQ ID NOs:3 and 4. These polynucleotide variants have at least 70%, at least 75%, at least 80%, at least 85%, at least 90%, at least 95%, at least 96%, at least 97%, at least 98%, or at least 99%, or greater, sequence identity compared to a polynucleotide sequence of this invention, as determined using the methods described herein, (for example, BLAST analysis using standard parameters). One skilled in this art will recognize that these values can be appropriately adjusted to determine corresponding identity of proteins encoded by two nucleotide sequences by taking into account codon degeneracy, amino acid similarity, reading frame positioning, and the like.

[0106] The terms “nucleic acid” and “polynucleotide” are used interchangeably herein to refer to single-stranded or double-stranded RNA, DNA, or mixed polymers. Polynucleotides can include genomic sequences, extra-genomic and plasmid sequences, and smaller engineered gene segments that express, or can be adapted to express polypeptides.

[0107] An “isolated nucleic acid” is a nucleic acid that is substantially separated from other genome DNA sequences as well as proteins or complexes such as ribosomes and polymerases, which naturally accompany a native sequence. The term encompasses a nucleic acid sequence that has been removed from its naturally occurring environment, and includes recombinant or cloned DNA isolates and chemically synthesized analogues or analogues biologically synthesized by heterologous systems. A substantially pure nucleic acid includes isolated forms of the nucleic acid. Accordingly, this refers to the nucleic acid as originally isolated and does not exclude genes or sequences later added to the isolated nucleic acid by the hand of man.

[0108] A polynucleotide “variant,” as the term is used herein, is a polynucleotide that typically differs from a polynucleotide specifically disclosed herein in one or more substitutions, deletions, additions and/or insertions. Such variants can be naturally occurring or can be synthetically generated, for example, by modifying one or more of the polynucleotide sequences of the invention and evaluating one or more biological activities of the encoded polypeptide as described herein and/or using any of a number of techniques well known in the art.

[0109] Modifications can be made in the structure of the polynucleotides of the described invention and still obtain a functional molecule that encodes a variant or derivative polypeptide with desirable characteristics. When it is desired to alter the amino acid sequence of a polypeptide to create an equivalent, or even an improved, variant or portion of a polypeptide of the invention, one skilled in the art typically will change one or more of the codons of the encoding DNA sequence.

[0110] Typically, polynucleotide variants contain one or more substitutions, additions, deletions and/or insertions, such that the immunogenic binding properties of the polypeptide encoded by the variant polynucleotide is not substantially diminished relative to a polypeptide encoded by a polynucleotide sequence specifically set forth herein.

[0111] In additional embodiments, the described invention provides polynucleotide fragments comprising various lengths of contiguous stretches of sequence identical to or complementary to one or more of the sequences disclosed herein. For example, polynucleotides are provided by this invention that comprise at least about 10, 15, 20, 30, 40, 50, 75, 100, 150, 200, 300, 400, 500 or 1000 or more contiguous nucleotides of one or more of the sequences disclosed herein as well as all intermediate lengths there between and encompass any length between the quoted values, such as 16, 17, 18, 19, etc.; 21, 22, 23, etc.; 30, 31, 32, etc.; 50, 51, 52, 53, etc.; 100, 101, 102, 103, etc.; 150, 151, 152, 153, etc.; and including all integers through 200-500; 500-1,000.

[0112] In another embodiment of the invention, polynucleotide compositions are provided that are capable of hybridizing under moderate to high stringency conditions to a polynucleotide sequence provided herein, or a fragment thereof, or a complementary sequence thereof. Hybridization techniques are well known in the art of molecular biology. For purposes of illustration, suitable moderate stringent conditions for testing the hybridization of a polynucleotide of this invention with other polynucleotides include prewashing in a solution of 5×SSC, 0.5% SDS, 1.0 mM EDTA (pH 8.0); hybridizing at 50-60° C., 5×SSC, overnight; followed by washing twice at 65° C. for 20 minutes with each of 2×, 0.5×, and 0.2×SSC containing 0.1% SDS. One skilled in the art will understand that the stringency of hybridization can be readily manipulated, such as by altering the salt content of the hybridization solution and/or the temperature at which the hybridization is performed. For example, in another embodiment, suitable highly stringent hybridization conditions include those described above, with the exception that the temperature of hybridization is increased, for example, to 60-65° C. or 65-70° C.

[0113] In some embodiments, the polypeptide encoded by the polynucleotide variant or fragment has the same binding specificity (i.e., specifically or preferentially binds to the same epitope or HIV strain) as the polypeptide encoded by the native polynucleotide. In some embodiments, the described polynucleotides, polynucleotide variants, fragments and hybridizing sequences, encode polypeptides that have a level of binding activity of at least about 50%, at least about 70%, and at least about 90% of that for a polypeptide sequence specifically set forth herein.

[0114] The polynucleotides of the described invention, or fragments thereof, regardless of the length of the coding sequence itself, can be combined with other DNA sequences, such as promoters, polyadenylation signals, additional restriction enzyme sites, multiple cloning sites, other coding segments, and the like, such that their overall length can vary considerably. A nucleic acid fragment of almost any length is employed. For example, illustrative polynucleotide segments with total lengths of about 10000, about 5000, about 3000, about 2000, about 1000, about 500, about 200, about 100, about 50 base pairs in length, and the like, (including all intermediate lengths) are included in many implementations of this invention.

[0115] In some embodiments, the polynucleotide sequences provided herein are used as probes or primers for nucleic acid hybridization, for example, as PCR primers. The ability of such nucleic acid probes to specifically hybridize to a sequence of interest enables them to detect the presence of complementary sequences in a given sample. However, other uses also are encompassed by the described invention, such as the use of the sequence information for the preparation of mutant species primers, or primers for use in preparing other genetic constructions. As such, nucleic acid segments of the described invention that include a sequence region of at least about a 15 nucleotide long contiguous sequence that has the same sequence as, or is complementary to, a 15 nucleotide long contiguous sequence disclosed herein is particularly useful. Longer contiguous identical or complementary sequences, for example, those of about 20, 30, 40, 50, 100, 200, 500, 1000 (including all intermediate lengths) including full length sequences, and all lengths in between, also are used in some embodiments.

[0116] Polynucleotide molecules having sequence regions consisting of contiguous nucleotide stretches of 10-14, 15-20, 30, 50, or even of 100-200 nucleotides or so (including intermediate lengths as well), identical or complementary to a polynucleotide sequence disclosed herein, are particularly contemplated as hybridization probes for use in, for example, Southern and Northern blotting, and/or primers for use in, for example, PCR. The total size of fragment, as well as the size of the complementary stretch(es), ultimately depends on the intended use or application of the particular nucleic acid segment. Smaller fragments generally are used in hybridization embodiments, wherein the length of the contiguous complementary region can be varied, such as between about 15 and about 100 nucleotides, but larger contiguous complementarity stretches can be used, according to the length complementary sequences one wishes to detect.

[0117] The use of a hybridization probe of about 15-25 nucleotides in length allows the formation of a duplex molecule that is both stable and selective. Molecules having contiguous complementary sequences over stretches greater than 12 bases in length can be utilized, though, in order to increase stability and selectivity of the hybrid, and thereby improve the quality and degree of specific hybrid molecules obtained. Nucleic acid molecules having gene-complementary stretches of 15 to 25 contiguous nucleotides, or even longer where desired, can be utilized.

[0118] Hybridization probes are selected from any portion of any of the sequences disclosed herein. All that is required is to review the sequences set forth herein, or to any continuous portion of the sequences, from about 15-25 nucleotides in length up to and including the full length sequence, that one wishes to utilize as a probe or primer. The choice of probe and primer sequences is governed by various factors. For example, one may wish to employ primers from towards the termini of the total sequence.

[0119] Further included within the scope of the invention are vectors such as expression vectors, comprising a nucleic acid sequence according to the invention. Cells transformed with such vectors also are included within the scope of the invention.

[0120] The present invention also provides vectors and host cells comprising a nucleic acid of the invention, as well as recombinant techniques for the production of a polypeptide of the invention. Vectors of the invention include those capable of replication in any type of cell or organism, including, for example, plasmids, phage, cosmids, and mini chromosomes. In some embodiments, vectors comprising a polynucleotide of the described invention are vectors suitable for propagation or replication of the polynucleotide, or vectors suitable for expressing a polypeptide of the described invention. Such vectors are known in the art and commercially available.

[0121] “Vector” includes shuttle and expression vectors. Typically, the plasmid construct also will include an origin of replication (for example, the ColE1 origin of replication) and a selectable marker (for example, ampicillin or tetracycline resistance), for replication and selection, respectively, of the plasmids in bacteria. An “expression vector” refers to a vector that contains the necessary control sequences or regulatory elements for expression of the antibodies including antibody fragment of the invention, in bacterial or eukaryotic cells.

[0122] As used herein, the term “cell” can be any cell, including, but not limited to, that of a eukaryotic, multicellular species (for example, as opposed to a unicellular yeast cell), such as, but not limited to, a mammalian cell or a human cell. A cell can be present as a single entity, or can be part of a larger collection of cells. Such a “larger collection of cells” can comprise, for example, a cell culture (either mixed or pure), a tissue (for example, endothelial, epithelial, mucosa or other tissue), an organ (for example, lung, liver, muscle and other organs), an organ system (for example, circulatory system, respiratory system, gastrointestinal system, urinary system, nervous system, integumentary system or other organ system), or an organism (e.g., a bird, mammal, or the like).

[0123] Polynucleotides of the invention may synthesized, whole or in parts that then are combined, and inserted into a vector using routine molecular and cell biology techniques, including, for example, subcloning the polynucleotide into a linearized vector using appropriate restriction sites and restriction enzymes. Polynucleotides of the described invention are amplified by polymerase chain reaction using oligonucleotide primers complementary to each strand of the polynucleotide. These primers also include restriction enzyme cleavage sites to facilitate subcloning into a vector. The replicable vector components generally include, but are not limited to, one or more of the following: a signal sequence, an origin of replication, and one or more marker or selectable genes.

[0124] In order to express a polypeptide of the invention, the nucleotide sequences encoding the polypeptide, or functional equivalents, may be inserted into an appropriate expression vector, i.e., a vector that contains the necessary elements for the transcription and translation of the inserted coding sequence. Methods well known to those skilled in the art may be used to construct expression vectors containing sequences encoding a polypeptide of interest and appropriate transcriptional and translational control elements. These methods include in vitro recombinant DNA techniques, synthetic techniques, and in vivo genetic recombination. Such techniques are described, for example, in Sambrook, J., et al. (1989) Molecular Cloning, A Laboratory Manual, Cold Spring Harbor Press, Plainview, N.Y., and Ausubel, F. M. et al. (1989) Current Protocols in Molecular Biology, John Wiley & Sons, New York. N.Y.

[0125] The present invention also provides kits useful in performing diagnostic and prognostic assays using the antibodies, polypeptides and nucleic acids of the present invention. Kits of the present invention include a suitable container comprising an HIV antibody, a polypeptide or a nucleic acid of the invention in either labeled or unlabeled form. In addition, when the antibody, polypeptide or nucleic acid is supplied in a labeled form suitable for an indirect binding assay, the kit further includes reagents for performing the appropriate indirect assay. For example, the kit may include one or more suitable containers including enzyme substrates or derivatizing agents, depending on the nature of the label. Control samples and/or instructions may also be included. The present invention also provide kits for detecting the presence of the HIV antibodies or the nucleotide sequence of the HIV antibody of the present invention in a biological sample by PCR or mass spectrometry.

[0126] “Label” as used herein refers to a detectable compound or composition that is conjugated directly or indirectly to the antibody so as to generate a “labeled” antibody. A label can also be conjugated to a polypeptide and/or a nucleic acid sequence disclosed herein. The label can be detectable by itself (for example, radioisotope labels or fluorescent labels) or, in the case of an enzymatic label, can catalyze chemical alteration of a substrate compound or composition that is detectable. Antibodies and polypeptides of the described invention also can be modified to include an epitope tag or label, for example, for use in purification or diagnostic applications. Suitable detection means include the use of labels such as, but not limited to, radionucleotides, enzymes, coenzymes, fluorescers, chemiluminescers, chromogens, enzyme substrates or co-factors, enzyme inhibitors, prosthetic group complexes, free radicals, particles, dyes, and the like.

[0127] According to another embodiment, the present invention provides diagnostic methods. Diagnostic methods generally involve contacting a biological sample obtained from a patient, such as, for example, blood, serum, saliva, urine, sputum, a cell swab sample, or a tissue biopsy, with an HIV antibody and determining whether the antibody preferentially binds to the sample as compared to a control sample or predetermined cut-off value, thereby indicating the presence of the HIV virus.

[0128] According to another embodiment, the present invention provides methods to detect the presence of the HIV antibodies of the present invention in a biological sample from a patient. Detection methods generally involve obtaining a biological sample from a patient, such as, for example, blood, serum, saliva, urine, sputum, a cell swab sample, or a tissue biopsy and isolating HIV antibodies or fragments thereof, or the nucleic acids that encode an HIV antibody, and assaying for the presence of an HIV antibody in the biological sample. Also, the present invention provides methods to detect the nucleotide sequence of an HIV antibody in a cell. The nucleotide sequence of an HIV antibody may also be detected using the primers disclosed herein. The presence of the HIV antibody in a biological sample from a patient may be determined utilizing known recombinant techniques and/or the use of a mass spectrometer.

[0129] In another embodiment, the present invention provides a method for detecting an HIV antibody comprising a heavy chain comprising a highly conserved consensus sequence and a light chain comprising a highly conserved consensus sequence in a biological sample, comprising obtaining an immunoglobulin-containing biological sample from a mammalian subject, isolating an HIV antibody from said sample, and identifying the highly conserved consensus sequences of the heavy chain and the light chain. The biological sample may be blood, serum, saliva, urine, sputum, a cell swab sample, or a tissue biopsy. The amino acid sequences may be determined by methods known in the art including, for example, PCR and mass spectrometry.

[0130] The term “assessing” includes any form of measurement, and includes determining if an element is present or not. The terms “determining”, “measuring”, “evaluating”, “assessing” and “assaying” are used interchangeably and include quantitative and qualitative determinations. Assessing may be relative or absolute. “Assessing the presence of” includes determining the amount of something present, and/or determining whether it is present or absent. As used herein, the terms “determining,” “measuring,” and “assessing,” and “assaying” are used interchangeably and include both quantitative and qualitative determinations.

### II. Method of Reducing Viral Replication

[0131] Methods for reducing an increase in HIV virus titer, virus replication, virus proliferation or an amount of an HIV viral protein in a subject are further provided. According to another aspect, a method includes administering to the subject an amount of an HIV antibody effective to reduce an increase in HIV titer, virus replication or an amount of an HIV protein of one or more HIV strains or isolates in the subject.

[0132] According to another embodiment, the present invention provides a method of reducing viral replication or spread of HIV infection to additional host cells or tissues comprising contacting a mammalian cell with the antibody, or a portion thereof, which binds to an antigenic epitope on gp120.

### III. Method of Treatment

[0133] According to another embodiment, the present invention provides a method for treating a mammal infected with a virus infection, such as, for example, HIV, comprising administering to said mammal a pharmaceutical composition comprising the HIV antibodies disclosed herein. According to one embodiment, the method for treating a mammal infected with HIV comprises administering to said mammal a pharmaceutical composition that comprises an antibody of the present invention, or a fragment thereof. The compositions of the invention can include more than one antibody having the characteristics disclosed (for example, a plurality or pool of antibodies). It also can include other HIV neutralizing antibodies as are known in the art, for example, but not limited to, VRC01, PG9 and b12.

[0134] Passive immunization has proven to be an effective and safe strategy for the prevention and treatment of viral diseases. (See, for example, Keller et al., Clin. Microbiol. Rev. 13:602-14 (2000); Casadevall, Nat. Biotechnol. 20:114 (2002); Shibata et al., Nat. Med. 5:204-10 (1999); and Igarashi et al., Nat. Med. 5:211-16 (1999), each of which are incorporated herein by reference). Passive immunization using human monoclonal antibodies provides an immediate treatment strategy for emergency prophylaxis and treatment of HIV.

[0135] Subjects at risk for HIV-related diseases or disorders include patients who have come into contact with an infected person or who have been exposed to HIV in some other way. Administration of a prophylactic agent can occur prior to the manifestation of symptoms characteristic of HIV-related disease or disorder, such that a disease or disorder is prevented or, alternatively, delayed in its progression.

[0136] For in vivo treatment of human and non-human patients, the patient is administered or provided a pharmaceutical formulation including an HIV antibody of the invention. When used for in vivo therapy, the antibodies of the invention are administered to the patient in therapeutically effective amounts (i.e., amounts that eliminate or reduce the patient's viral burden). The antibodies are administered to a human patient, in accord with known methods, such as intravenous administration, for example, as a bolus or by continuous infusion over a period of time, by intramuscular, intraperitoneal, intracerobrospinal, subcutaneous, intra-articular, intrasynovial, intrathecal, oral, topical, or inhalation routes. The antibodies can be administered parenterally, when possible, at the target cell site, or intravenously. In some embodiments, antibody is administered by intravenous or subcutaneous administration. Therapeutic compositions of the invention may be administered to a patient or subject systemically, parenterally, or locally. The above parameters for assessing successful treatment and improvement in the disease are readily measurable by routine procedures familiar to a physician.

[0137] For parenteral administration, the antibodies may formulated in a unit dosage injectable form (solution, suspension, emulsion) in association with a pharmaceutically acceptable, parenteral vehicle. Examples of such vehicles include, but are not limited, water, saline, Ringer's solution, dextrose solution, and 5% human serum albumin. Nonaqueous vehicles include, but are not limited to, fixed oils and ethyl oleate. Liposomes can be used as carriers. The vehicle may contain minor amounts of additives such as substances that enhance isotonicity and chemical stability, such as, for example, buffers and preservatives. The antibodies can be formulated in such vehicles at concentrations of about 1 mg/ml to 10 mg/ml.

[0138] The dose and dosage regimen depends upon a variety of factors readily determined by a physician, such as the nature of the infection, for example, its therapeutic index, the patient, and the patient's history. Generally, a therapeutically effective amount of an antibody is administered to a patient. In some embodiments, the amount of antibody administered is in the range of about 0.1 mg/kg to about 50 mg/kg of patient body weight. Depending on the type and severity of the infection, about 0.1 mg/kg to about 50 mg/kg body weight (for example, about 0.1-15 mg/kg/dose) of antibody is an initial candidate dosage for administration to the patient, whether, for example, by one or more separate administrations, or by continuous infusion. The progress of this therapy is readily monitored by conventional methods and assays and based on criteria known to the physician or other persons of skill in the art. The above parameters for assessing successful treatment and improvement in the disease are readily measurable by routine procedures familiar to a physician.

[0139] Other therapeutic regimens may be combined with the administration of the HIV antibody of the present invention. The combined administration includes co-administration, using separate formulations or a single pharmaceutical formulation, and consecutive administration in either order, wherein preferably there is a time period while both (or all) active agents simultaneously exert their biological activities. Such combined therapy can result in a synergistic therapeutic effect. The above parameters for assessing successful treatment and improvement in the disease are readily measurable by routine procedures familiar to a physician.

[0140] The terms “treating” or “treatment” or “alleviation” are used interchangeably and refer to both therapeutic treatment and prophylactic or preventative measures; wherein the object is to prevent or slow down (lessen) the targeted pathologic condition or disorder. Those in need of treatment include those already with the disorder as well as those prone to have the disorder or those in whom the disorder is to be prevented. A subject or mammal is successfully “treated” for an infection if, after receiving a therapeutic amount of an antibody according to the methods of the present invention, the patient shows observable and/or measurable reduction in or absence of one or more of the following: reduction in the number of infected cells or absence of the infected cells; reduction in the percent of total cells that are infected; and/or relief to some extent, one or more of the symptoms associated with the specific infection; reduced morbidity and mortality, and improvement in quality of life issues. The above parameters for assessing successful treatment and improvement in the disease are readily measurable by routine procedures familiar to a physician.

[0141] The term “therapeutically effective amount” refers to an amount of an antibody or a drug effective to treat a disease or disorder in a subject or mammal.

[0142] Administration “in combination with” one or more further therapeutic agents includes simultaneous (concurrent) and consecutive administration in any order.

[0143] “Carriers” as used herein include pharmaceutically acceptable carriers, excipients, or stabilizers that are nontoxic to the cell or mammal being exposed thereto at the dosages and concentrations employed. Often the physiologically acceptable carrier is an aqueous pH buffered solution. Examples of physiologically acceptable carriers include, but not limited to, buffers such as phosphate, citrate, and other organic acids; antioxidants including, but not limited to, ascorbic acid; low molecular weight (less than about 10 residues) polypeptide; proteins, such as, but not limited to, serum albumin, gelatin, or immunoglobulins; hydrophilic polymers such as, but not limited to, polyvinylpyrrolidone; amino acids such as, but not limited to, glycine, glutamine, asparagine, arginine or lysine; monosaccharides, disaccharides, and other carbohydrates including, but not limited to, glucose, mannose, or dextrins; chelating agents such as, but not limited to, EDTA; sugar alcohols such as, but not limited to, mannitol or sorbitol; salt-forming counterions such as, but not limited to, sodium; and/or nonionic surfactants such as, but not limited to, TWEEN.; polyethylene glycol (PEG), and PLURONICS.

[0144] Where a value of ranges is provided, it is understood that each intervening value, to the tenth of the unit of the lower limit unless the context clearly dictates otherwise, between the upper and lower limit of that range and any other stated or intervening value in that stated range is encompassed within the invention. The upper and lower limits of these smaller ranges which may independently be included in the smaller ranges is also encompassed within the invention, subject to any specifically excluded limit in the stated range. Where the stated range includes one or both of the limits, ranges excluding either both of those included limits are also included in the invention.

[0145] Unless defined otherwise, all technical and scientific terms used herein have the same meaning as commonly understood by one of ordinary skill in the art to which this invention belongs. Although any methods and materials similar or equivalent to those described herein can also be used in the practice or testing of the present invention, the preferred methods and materials are now described. All publications mentioned herein are incorporated herein by reference in their entireties.

[0146] As used herein and in the appended claims, the singular forms “a”, “and” and “the” include plural references unless the context clearly dictates otherwise

[0147] Publications disclosed herein are provided solely for their disclosure prior to the filing date of the present invention. Nothing herein is to be construed as an admission that the present invention is not entitled to antedate such publication by virtue of prior invention. Further, the dates of publication provided may be different from the actual publication dates which may need to be independently confirmed.

[0148] Each of the applications and patents cited in this text, as well as each document or reference, patient or non-patient literature, cited in each of the applications and patents (including during the prosecution of each issued patent; “application cited documents”), and each of the PCT and foreign applications or patents corresponding to and/or claiming priority from any of these applications and patents, and each of the documents cited or referenced in each of the application cited documents, are hereby expressly incorporated herein by reference in their entirety. More generally, documents or references are cited in this text, either in a Reference List before the claims; or in the text itself; and, each of these documents or references (“herein-cited references”), as well as each document or reference cited in each of the herein-cited references (including any manufacturer's specifications, instructions, etc.), is hereby expressly incorporated herein by reference.

[0149] The following non-limiting examples serve to further illustrate the present invention.

### Example 1

### Materials, Methods and Instrumentation

[0150] Samples.

[0151] Human samples were collected after signed informed consent in accordance with Institutional Review Board (IRB)-reviewed protocols by all participating institutions. Patient 1 was selected from a cohort of long-term non-progressors followed at the Aaron Diamond Aids Research Center, New York. Patients 3 and 8 were selected from a group of elite controllers that were followed at the Ragon Institute in Boston. Patients 1, 3 and 8 were selected based on their broad neutralizing serum activity against a standard panel of HIV isolates. Patient 12 was selected from the Protocol G Cohort of the “International Aids Vaccine Initiative” based on broad serum neutralizing activity.

[0152] Staining, Single-Cell Sorting and Antibody Cloning.

[0153] Staining and single cell sorting of 2CC-Core and gp140 specific Ig+ memory B cells was performed (J. F. Scheid et al., Nature 458, 636 (Apr. 2, 2009)). Briefly, CD19+B cells were enriched from peripheral blood mononuclear cells using anti human CD19 magnetic MACS beads (Miltenyi Biotec) and subsequently stained with anti human CD20 and anti human IgG antibodies (Becton Dickinson) as well as biotinylated 2CC-Core (B. Dey et al., PLoS Pathog 5, e1000445 (May, 2009)) or YU2-gp140 trimer (R. Diskin, P. M. Marcovecchio, P. J. Bjorkman, Nat Struct Mol Biol 17, 608 (May, 2010)) followed by detection with streptavidin coupled phycoerythrin (PE, Beckton Dickinson). Single cells were sorted on a FACSAria III cell sorter (Becton Dickinson), excluding cell doublets, into 96-well PCR plates (Denville) containing 4 μl/well of ice-cold 0.5× phosphate-buffered saline (PBS) containing 10 mM DTT, 8 U RNAsin® (Promega), 0.4 U 5′-3′ Prime RNAse Inhibitor™ (Eppendorf). Plates were sealed with Microseal® ‘F’ Film (BioRad), immediately frozen on dry ice before storage at −80° C.

[0154] cDNA synthesis and Ig amplification were performed (H. Wardemann et al., Science 301, 1374 (Sep. 5, 2003)) with following modifications:

[0155] Instead of using the original primer sets, first and second immunoglobulin specific PCRs were carried out using the primers described in Table 1 in a semi-nested approach. Cloning of heavy and light chain PCR products into their respective expression vectors was performed and 100% identity of cloned expression plasmids with the original PCR product confirmed by sequencing before expression of the antibodies in HEK 293 cells.

[0156] ELISAs.

[0157] High-binding 96-well ELISA plates (Costar) were coated overnight with 100 ng/well of purified antigens (gp140, gp120, gp41, gp120^{core} and 2CC-core) (B. Dey et al., PLoS Pathog 5, e1000445 (May, 2009)) and mutant proteins (gp120 D368R, gp120 I420R) in PBS. After washing, plates were blocked 2 h with 2% BSA, 1 μM EDTA, 0.05% Tween-PBS (Blocking buffer) and then, incubated 2h with IgG antibodies diluted at 4 μg/ml and several consecutive 1:4 dilutions in PBS. After washing, the plates were developed by incubation for 1 h with goat HRP-conjugated anti-mouse IgG (Jackson ImmunoReseach) (at 0.8 μg/ml in blocking buffer) and by adding 100 μl of HRP chromogenic substrate (ABTS solution, Invitrogen). Optical densities were measured at 405 nm (OD_{405 nm}) using an ELISA microplate reader (Molecular Devices). Background values given by incubation of PBS alone in coated wells were subtracted. IgG Antibodies were tested for polyreactivity (H. Mouquet et al., Nature 467, 591 (Sep. 30, 2010)) and considered polyreactive when they recognized at least two structurally different antigens out of the four tested; ssDNA, dsDNA, insulin, and LPS. Threshold values for reactivity were determined by using control antibodies mGO53 (negative), eiJB40 (low positive), and ED38 (high positive).

[0158] Neutralization Assays:

[0159] Neutralization screens were performed (D. C. Montefiori, Curr Protoc Immunol Chapter 12, Unit 12 11 (January, 2005)). In brief, neutralization was detected as reduction in luciferase reporter gene expression after single round infection in Tzm-b1 cells. In order to rule out unspecific antiviral activity in antibody samples MuLV (murine leukemia virus) was used as a negative control.

[0160] Clone Specific Identification of Bone Marrow Plasma Cells.

[0161] Bone marrow plasma cells were stained with anti human CD138 and anti CD19 antibodies (Becton Dickinson) after Ficoll purification of mononuclear cells from bone marrow aspirates using Ficoll-Paque (GE Healthcare). CD138+ CD19+ human plasma cells were bulk sorted on a FACSAriaIII cell sorter (Becton Dickinson) and RNA isolation performed on 100.000 cells using Trizol LS reagent (Invitrogen) according to the manufacturers instructions. RNA was reverse transcribed using Superscript III reverse transcriptase (Invitrogen) according to manufacturers instructions. cDNA was then subjected to Immunoglobulin specific PCR with following modifications: 1 μl of cDNA was amplified in 2 rounds of nested immunoglobulin heavy chain clone specific PCR using first round forward leader and constant region reverse primers shown in Table 1 followed by clone specific forward and reverse primers designed based on sequencing results from single cell analysis. PCR products were gel purified and cloned into TOPO TA vectors (Invitrogen) according to the manufacturers instructions. Colonies were screened by PCR with clone specific primers and sequenced.

[0162] Surface Plasmon Resonance.

[0163] All experiments were performed with a Biacore T100 (Biacore, Inc) in HBS-EP+ running buffer (Biacore, Inc) at 25° C. as described previously (Mouquet 2010). YU-2 gp140 and 2CC-core proteins at 12.5 μg/mL were immobilized on CM5 chips (Biacore, Inc.) by amine coupling at pH 4.5 resulting in an immobilization level of 100 RUs. For kinetic measurements on the gp140- and 2CC-core-derivatized chips, IgGs were injected through flow cells at 700 nM and 4 successive 1:2-dilutions in HBS-EP+ running buffer (Biacore, Inc.) at flow rates of 40 μL/min with 3 min association and 5 min dissociation. The sensor surface was regenerated between each experiment with a 30 second injection of 10 mM glycine-HCl pH 2.5 at a flow rate of 50 μL/min. Off rate (k_{d} (s⁻¹)), on rate (kₐ (M⁻¹ s⁻¹) and binding constants (K_{D} (M) or K_{A} (M⁻¹) were calculated after subtraction of backgrounds (binding to control flow cells and signal of the HBS-EP+ running buffer) using Biacore T100 Evaluation software using the kinetic analysis and the 1:1 binding model. The sensorgrams showed in FIG. 2 and FIG. 8 are derived from the Biacore data processing using Scrubber 2 sofware (Center for Biomolecular Interaction Analysis, University of Utah).

[0164] CD4i Site Induction.

[0165] 293T cells were transfected with gp160^{BAL26}Δc or gp160^{YU.2}Δc in a pMX-IRES-GFP construct (Pietzsch et al. 2010) using Fugene™6 (Roche) at a 1:2 plasmid:Fugene ratio. After 48 hours 293T cells were washed with PBS and detached with Trypsin-free cell dissociation buffer (Gibco) and resuspended at a concentration of 10⁷ cells/ml in FACS buffer (1×PBS, 2% FBS, 2 mM EDTA). sCD4 (Progenics Pharmaceuticals, Inc.) and mAbs were added to gp160-expressing 293T cells in a 1:4 dilution series starting with a final concentration of 40 μg/ml. mGO is a negative control antibody that does not bind to gp160Δc (H. Mouquet et al., Nature 467, 591 (Sep. 30, 2010)). After incubation for 15 min on ice cells were split and stained for 25 min on ice with an Alexa647-labeled CD4-induced site mAb (3-67; (J. F. Scheid et al., Nature 458, 636 (Apr. 2, 2009)) or an Alexa647-labeled control mAb (i.e. PG16; L. M. Walker et al., Science 326, 285 (Oct. 9, 2009)) or 2G12 for gp160^{YU.2} and 2G12 for gp160^{BAL.26}). Antibody labeling was performed by using Alexa Fluor® 647 Microscale Protein Labeling Kit (Invitrogen). Cells were analyzed on an LSRFortessa cell analyzer (BD Bioscience).

[0166] Crystallization.

[0167] The 3BNC60 IgG was expressed by transient expression in HEK293-6E cells and prepared the Fab fragment was prepared by papain cleavage (R. Diskin, P. M. Marcovecchio, P. J. Bjorkman, Nat Struct Mol Biol 17, 608 (May, 2010). Crystallization screens were conducted at 20° C. by vapor diffusion in nL sitting drops using a Mosquito™ (TTP LabTech) crystallization robot on MRC crystallization plates (Jena Bioscience). We combined 3BNC60 Fab at a concentration of 9.5 mg/ml with reservoir solution in a 1:1 ratio to create 400 nL drops. Initial crystallization hits were obtained using the PEGRx HT™ (Hampton Research) crystallization screen and further optimized manually. Crystals suitable for data collection grew after several weeks in 11.7% polyethylene glycol 20,000, 0.1 M sodium acetate pH 5.0, 100 mM potassium/sodium tartrate, 20 mM lithium sulfate, 10 mM N-Cyclohexyl-2-aminoethanesulfonic acid (CHES) pH 9.5 in the monoclinic space group P2₁ with two Fabs in the asymmetric unit. Crystals were soaked in reservoir solution supplemented with 15% glycerol for 2 hours before immersing in reservoir solution supplemented with 30% glycerol and flash cooling in liquid nitrogen. Diffraction data were collected at the Stanford Synchrotron Radiation Lightsource (SSRL) beam-line 12-2 at 100 K using a Pilatus 6M detector. Data were indexed, integrated, and scaled using XDS W. Kabsch, Acta Crystallogr D Biol Crystallogr 66, 125 (February, 2010) (Table 8). Molecular replacement was conducted using Phaser with the V_{H} and C_{H}1 domains from the anti-tumor antibody CTM01 (PDB code 1AD9) and with the V_{L} and C_{L} domains of the anti-gp120 b13 antibody (PDB code 3IDX) as search models. Model building and refinement to 2.65 Å resolution was done iteratively using Phenix P. Emsley, B. Lohkamp, W. G. Scott, K. Cowtan, Acta Crystallogr D Biol Crystallogr 66, 486 (April, 2010) and Coot (P. Emsley, B. Lohkamp, W. G. Scott, K. Cowtan, Acta Crystallogr D Biol Crystallogr 66, 486 (April, 2010)). The structure was refined using a maximum-likelihood target function and non-crystallographic symmetry restraints. The final model (R_{work}=20.7%; R_{free}=25.7%) includes 6478 protein atoms, 146 water molecules and 28 sugar atoms (Table 8). 91.9%, 7.6% and 0.5% of the residues were in the favored, allowed, and disallowed regions, respectively, of the Ramachandran plot. Structural analyses and visualization were done using PyMol (The PyMOL Molecular Graphics System, Version 1.3, Schrodinger, LLC). The 3BNC60 structure consists of residues 3-205 for the light chain (including the first N-acetylglucosamine within an N-linked carbohydrate attached to Asn72) and 2-217 for the heavy-chain. Residues at the termini residues and residues 133-140 within the C_{H}1 domain are disordered.

[0168] Mass Spectrometry.

[0169] IgG was purified from serum using ProteinG Sepharose (GE Healthcare) according to the manufacturers instructions. IgGs were then digested with immobilized papain (Pierce) and digested Fab-Fc fragment mixes incubated with saturating quantities of biotinylated 2CC-Core protein. Streptavidin coupled Dynabeads (Invitrogen) were added after incubation for 15 minutes at room temperature and subjected to 10 rounds of washing with Phosphate Buffered Saline (Gibco). Bound Fab fragments were eluted with lithium dodecyl sulfate buffer (Invitrogen) at 95 C and sample purity confirmed with SDS-polyacrylamide gel electrophoresis followed by silver stain or coomassie staining before analysis by mass spectrometry.

[0170] Isolated Fab fragments were reduced with dithiothreitol, alkylated using iodoacetamide, resolved by 1D gel electrophoresis on a 4-12% NuPAGE Novex Bis-Tris gel (Invitrogen), and stained with Coomassie Blue (Thermo Fisher). The Fab fragments were excised from the gel, and digested using 200 ng of trypsin (Promega). The resulting peptides were isolated using reverse phase resin (PORS 20 R2, Applied Biosystem) and eluted using an aliquot of 40% acetonitrile in 0.5% acetic acid and a second aliquot of 80% acetonitrile in 0.5% acetic acid. Acetonitrile was removed using a speedvac (Thermo Fisher Scientific) and aliquots of the remaining solution pressure loaded onto self-packed PicoFrit® column (New Objective, Woburn, Mass.) with integrated emitter tip (360 μm O.D., 50 μm I.D., 10 μm tip), packed with 6 cm of reverse-phase C18 material (ReproSil-Pur C18-AQ, 3 μm beads from Dr. Maisch GmbH) and interfaced to a Agilent 1200 series HPLC system (Agilent) with either a LTQ Orbitrap™ XL mass spectrometer or a LTQ Orbitrap Velos™ mass spectrometer (Thermo Fisher Scientific) using a home-built micro electrospray source. The peptides were eluted into the mass spectrometer with the following gradient: 0 to 5% B in 5 min, 40% B in 125 min, 60% B in 150 min, 100% B in 165 min (A=0.1 M acetic acid, B=70% acetonitrile in 0.1 M acetic acid, flow rate 90 nL/min). Both instruments were operated in the data dependent mode and for both mass spectrometers the target value was set to 5e5 ions and a resolution of 60,000 (at 400 m/z). For analysis on the LTQ Orbitrap™ XL a full scan was followed by 8 MS/MS scans on the 8 most abundant ions from that full scan. The peptides (only charge states>1) were isolated with a 2 Da window, target window of 1e4 ions, dissociated via CAD (normalized collision energy=35, activation Q=0.25, activation time 30 msec) and mass analyzed in the LTQ. For analysis on the LTQ Orbitrap™ Velos a full scan was followed by 10 MS/MS scans at 7,500 resolution on the 10 most abundant ions from the immediate preceding full scan. The peptides (only charge state>2) were isolated with a 3 Da window, target window of 2e5 ions, dissociated via HCD (normalized collision energy=40, activation time 0.100 msec) and mass analyzed in the Orbitrap. For either instrument the ions selected for MS/MS were set on an exclusion list for 30 seconds. The resulting MS/MS spectra were searched against the Human IPI and in-house patient specific IgG database using Xtandem!, peptides were automatically compared to tryptic peptides in the human IPI and our in-house patient specific database. Peptide hits corresponding to patient specific IgG were manually confirmed.

[0171] Multiple Sequence Alignments.

[0172] All multiple sequence alignments were conducted using CLUSTALW2 with default parameters (weight matrix: GONNET for proteins and UIB for DNA, gap open=10, gap extension 0.1). Alignments shading were generated using TeXshade package.

[0173] Alignment Consensus.

[0174] The consensus sequences for multiple alignments were generated based on identity and similarity between residues (>=70%). The amino acids were grouping due similarity as: FYW, ILVM, RK, DE, GA, ST and NQ.

[0175] Phylogenetic Germline Trees.

[0176] The relationship between sequences was generated using the Neighbor-Joining method. The bootstrap consensus tree inferred from 1000 replicates was taken to represent the relationship. Branches corresponding to partitions reproduced in less than 50% bootstrap replicates are collapsed. The percentage of replicate trees in which the associated sequence clustered together in the bootstrap test (1000 replicates) are shown next to the branches. The tree is drawn to scale, with branch lengths in the same units as those of the evolutionary distances used to infer the phylogenetic tree. The evolutionary distances were computed using the number of differences method and are in the units of the number of amino acid differences per sequence. All ambiguous positions were removed for each sequence pair. Evolutionary analyses were conducted in MEGAS.

[0177] R/S Ratio Calculation.

[0178] DNA sequences were superposed over the proteins alignments to replacement/substitution calculation. All gaps positions were removed from the analysis. The R/S ratio analysis was conducted using Perl scripts.

### Example 2

### Isolating HIV Antibodies

[0179] To determine whether HIV antibody cloning is limited because of somatic mutation, a new series of primers was designed to avert this potential problem (Table 1). The new primer set was tested by sorting B cells that bind to an HIV-gp120 core protein lacking the V1-3 loops and containing a pair of stabilizing disulfide bonds (2CC-core). In contrast to the re-surfaced bait used to clone VRC01, the 2CC-core bait also allows capture of antibodies to the CD4-induced co-receptor binding site (CD4i).

[0180] In side-by-side comparisons, the new primer set increased recovery of IgH chains when compared to the initial primer set (FIG. 4(a)). The antibodies obtained with the new primer set were more mutated (average 35.6 vs. 19.8 p=<0.0001 and maximum 85 vs. 50 for IgH) and included clones that were not found with the original primer set (FIG. 4(a)). To determine whether the new primers rescue VRC01-like antibodies from cells that had been sorted with YU2 gp140, frozen cDNA samples from that individual which had already been examined exhaustively with the original primer set without producing any VRC01 related clones were examined. In 80 wells, 3 antibodies corresponding to VRC01 variants as determined by the IgH and IgL sequences were found (FIGS. 5A and B). It was concluded that VRC01-like antibodies were captured by the gp140 trimer, and that primers that were specifically designed to clone highly mutated antibodies captured a larger fraction of anti-HIV antibodies from the memory B cells of patients with high titers of broadly neutralizing antibodies.

[0181] Four unrelated HIV infected individuals, including 2 Caucasians, 1 Hispanic and 1 African donor, showing high titers of broadly neutralizing antibodies were examined using the 2CC-core bait, including 2 individuals whose previously cloned antibodies could not account for their serologic activity (Table 2 and FIGS. 6A and B). 576 antibodies representing 201 different unique and diversified clones were obtained from a starting population of 1.5×10⁵ IgG⁺ memory B cells (Table 3).

### Example 3

### Binding Specificity of HIV Antibodies

[0182] The size of the antibody clones captured by 2CC-core bait differed widely ranging from 2-76 diversified members (Table 3). To determine whether the antibodies captured by the 2CC-core bind to the HIV spike, ELISAs were performed using YU2 gp120 on representative members of each expanded clone. All of the antibodies tested bound to gp120 (Table 3).

[0183] The site of antibody binding on the HIV spike was mapped using mutant proteins that interfere with either the CD4bs (gp120(D368R)), or the CD4-induced co-receptor binding site (CD4i, gp120(I420R)). As reported, X. Wu et al., Science 329, 856 (Aug. 13, 2010), VRC01 is classified as a CD4bs antibody since it is sensitive to the D368R mutation, but because of the proximity of the CD4i site, it also shows some sensitivity to the 1420R mutation. NIH45-46, which is a VRC01 variant, and antibodies 3BNC60, 8ANC131, and 12A12 showed ELISA patterns that were similar to VRC01 (These clonal members were selected based on neutralizing activity, Table 3). Other clones, including 1B2530, and 8ANC195, were equally sensitive to both mutations and could not be classified precisely based solely on ELISA.

[0184] To determine whether the antibodies are polyreactive, ELISAs were performed on purified ssDNA, dsDNA, insulin, and LPS. 63% of the anti-2CC Core antibodies tested were polyreactive. It was concluded that the majority of the antibodies captured by the 2CC-bait recognize either the CD4bs or the CD4i site on gp120 and many are also polyreactive.

### Example 4

### Somatic Hypermutation

[0185] Somatic hypermutation is required for development of high affinity antigen binding and in some cases contributes to polyreactivity of anti-HIV antibodies. To test if this is the case for highly mutated 2CC-core specific antibodies, 4 representative antibodies were reverted to the corresponding germline. Reversion led to complete loss of antigen binding in ELISA for all 4 clones tested and to loss of polyreactivity.

### Example 5

### HIV Neutralization

[0186] HIV neutralizing activity was measured in standardized in vitro assays using an initial panel of 8 viruses including 3 tier 1 Clade A, B and C, and 5 tier 2 Clade B Env pseudovirus variants (M. S. Seaman et al., J Virol 84, 1439 (February, 2010)). The neutralizing activity of the antibodies was compared to VRC01 and purified serum IgG from the donors (FIG. 1A, Table 4 and FIG. 6). Antibodies showing high levels of neutralizing activity were further tested on a panel of 15 additional tier 2 Clade A, B, C, D, G, AG and AE Env pseudovirus variants (FIG. 1B, Table 5) including 5 viruses that are resistant to VRC01 (FIG. 1B and Table 5).

[0187] 90% of all of the antibodies tested showed some neutralizing activity and 6 clones contained antibody variants that showed high levels of potency and breadth (FIGS. 1A, B and C and Tables 4 and 5). These clones were also the most abundant among those captured by the 2CC-bait in each of the four patients studied (Table 3). The most impressive of the new antibodies, 3BNC117 belonging to a clone with 76 members, showed an average IC₈₀ on a combined group of 14 tier 2 viruses of 0.5 μg/ml as compared to 1.8 μg/ml for VRC01 (FIG. 1C, Tables 4 and 5).

[0188] Only 4 of the 20 viruses tested were more sensitive to VRC01 than 3BNC117, whereas 14 were more sensitive to 3BNC117 including DU172.17 which is completely resistant to VRC01 but sensitive to 3BNC117 (FIGS. 1B and C). NIH45-46, a new variant of VRC01, is more potent than VRC01 on 15 of the 20 viruses tested but still less potent than 3BNC117 (FIGS. 1B and C and Tables 4, and 5).

[0189] There was substantial variation in neutralizing breadth and potency among the members of the 5 most potent neutralizing antibody clones. For example, 3BNC156, a variant of 3BNC117, neutralized only 2 of the viruses in the initial panel and at much higher concentrations than 3BNC117 (FIG. 1A and Table 4) and 3BNC55, another variant, was intermediate between the two showing activity against 6 viruses at an average IC₅₀ of 4 μg/ml (FIG. 1 and Table 4). Finally, the most active antibodies were highly hypermutated. The average number of mutations for the top 10 antibodies was 72 for V_{H} and 45 for V_{L}, and this was associated with their breadth and potency (Tables 4 and 5). Reversion of the mutated residues to germline resulted in a complete loss of neutralizing activity for all of the antibodies tested.

### Example 6

### Identification of Diagnostic Peptides

[0190] The foregoing cloning strategy captured antibodies produced by antigen binding memory B cells, but circulating antibodies are not produced by these cells, and originate instead from plasma cells in the bone marrow. However, cognate antigen cannot be used as bait to capture plasma cells because they do not express surface Ig A. (Radbruch et al., Nat Rev Immunol 6, 741 (October, 2006)). In addition, the relationship between plasma cells in the bone marrow and circulating memory B cells is not defined precisely. To determine whether the antibodies cloned from memory B cells are also found in the bone marrow plasma cell compartment, CD138-expressing plasma cells were purified from paired bone marrow samples from 2 of the 4 individuals studied and used PCR to specifically amplify IgV_{H} genes for the more potent antibodies cloned from memory B cells in these individuals. The following were the clone specific primers for RU01:

(FWRD)

(SEQ ID NO. 584)

CTGCAACCGGTGTACATTCTCAAGTGCAACTGGTGC,
(FWRD)

(SEQ ID NO. 585)

CTGCAACCGGTGTACATTCTCAGGTCCATTTGTCACAG,
(REV)

(SEQ ID NO. 586)

TGCGAAGTCGACGCTGACGAGACAGTGACCTGC,
(REV)

(SEQ ID NO. 587)

TGCGAAGTCGACGCTGAAGAGACAATAATTTG,
(REV)

(SEQ ID NO. 588)

TGCGAAGTCGACGCTGACGAGACAATAACT
and for RU10:
(FWRD)

(SEQ ID NO. 589)

CTGCAACCGGTGTACATTTTCAGGGGCACTTGGTG,
(REV)

(SEQ ID NO. 590)

TGCGAAGTCGACGCTGAGGTGACGATGACCGTG.

Members of the selected clones and large numbers of additional variants were readily identified in both patients.

[0191] To verify that these antibodies can also be found in serum, IgG purified from the serum of the same 2 and one additional individual were adsorbed on the 2CC-core bait and mass spectrometry was performed on the eluted IgG (FIG. 1D, FIG. 7 and FIGS. 10A-C). Diagnostic peptides were found for the highly active antibody variants in all cases (FIG. 7, FIG. 10A-C). It was concluded that broad and potent anti-HIV antibodies cloned from memory B cells were also found in the bone marrow plasma cell compartment, and in the circulating IgGs of patients with high serum titers of broadly neutralizing antibodies.

### Example 7

### HIV Antibody Binding Characteristics

[0192] To determine whether antibody affinity to gp120 is related to neutralizing activity, the binding of the highly active antibodies, selected clonal relatives and germline reverted progenitors were compared using Surface Plasmon Resonance (SPR) (FIGS. 2A and B, FIG. 8 and Table 6).

[0193] The top neutralizing antibodies showed affinities (K_{A}) ranging from ≅10⁷-10¹² (M⁻¹) on YU2 gp140 trimers and ≅10⁷-10¹¹ (M⁻¹) on the 2CC-core (FIGS. 2A and B and Table 6). Consistent with their decreased neutralizing potency and breadth, 3BNC66, 3BNC156 and 3BNC55 displayed lower affinities on YU2 gp140 trimers than 3BNC117, but surprisingly, affinities to 2CC-core did not correlate with neutralizing activity (FIG. 1, FIG. 8, Table 4 and Table 6). Binding by SPR was not detected for any of the germline reverted antibodies tested (FIG. 2B, Table 6). It was concluded that the anti-HIV antibodies captured by the YU2 2CC-core tended to show higher affinity to the corresponding gp140 trimer than to the 2CC-core.

[0194] When VRC01 binds to the HIV spike it produces large conformational changes that mimic CD4 binding and expose the CD4i site. By contrast, b12 and most other known anti-CD4bs antibodies do not.

[0195] To determine whether this is a shared feature of the highly active antibodies, HIV-BAL.26Δc or -YU2 gp160Δc was expressed on the surface of HEK 293T cells and CD4i antibody binding measured in the presence or absence of CD4 or anti-CD4bs antibodies (FIG. 2C). With one exception, all of the highly active antibodies tested resembled CD4 and VRC01 in that they facilitated anti-CD4i antibody binding to either HIV-BAL.26 or YU2 gp160Δc or both (FIG. 2C).

[0196] The only highly active antibody that did not share this characteristic, 8ANC195, was not a traditional anti-CD4bs antibody in that it was equally sensitive to the D368R and I420R mutations (Table 3). In addition, it differed from the other highly active antibodies in its neutralization pattern: it did not neutralize any of the tier 1 viruses and showed potent activity against H086.8, a Glade B virus resistant to all other antibodies tested including 3BNC117, VRC01 and b12 (FIGS. 1 A and B and Tables 4 and 5).

### Example 8

### HIV Antibody Sequence Identity

[0197] To determine whether highly active anti-CD4bs antibodies share common sequence features, the 10 best antibodies: 2 variants each from 5 independently derived antibody clones from 5 different patients were aligned (FIG. 3). Comparison of the IgV_{H} regions revealed a highly conserved consensus sequence covering 68 IgV_{H} residues (FIG. 3A). The IgV_{H} consensus included 6 of VRC01-gp120 contact residues, including VRC01-Arg 71, which mimics the key interaction of Arg59_{CD4} and Asp368_{gp120} (FIG. 3A). Moreover, the consensus, including the 6 contact residues, was entirely conserved in both of the closely related germline IgV_{H} genes (V_{H}1-2 and V_{H}1-46) that give rise to all of the antibodies in this class (FIGS. 3A and B).

[0198] The codons encoding the consensus residues were highly somatically mutated in the 10 selected antibodies, nevertheless the amino acid sequence was conserved (FIG. 9). The ratio of replacement to silent mutations in the consensus residues ranged from 0.7-1.7, whereas it was 3.5-22 in the non-consensus residues indicating that conservation of the consensus is strongly selected (Table 7). In contrast to the heavy chain, the light chain of VRC01 made only 8 out of a total of 32 contacts with gp120. Consistent with its more limited role, comparison of the light chain sequences of the same antibodies uncovered a less extensive consensus covering 53 IgV_{L} residues including 3 VRC01-gp120 contact residues (FIG. 3B). Finally, like the heavy chains, the light chains arose from a limited set of germline genes: 2 were derived from IgK1D-33, 2 from IgK3-11, and one from IgL1-47 (FIG. 3B and Table 3). Antibody 8ANC195, which differed from the others in several important respects did not entirely conform to the consensus and did not arise from related heavy or light chains (FIGS. 3A and B) It was concluded that there is significant sequence convergence among highly active agonistic anti-CD4bs antibodies (HAADs).

### Example 9

### Crystal Structure of 3BNC60 Fab

[0199] To determine whether the structure of the antibodies in different patients is also conserved, the crystal structure of the 3BNC60 Fab was solved to 2.65 Å resolution and compared it to VRC01. The structure revealed the four domains, V_{H}, C_{H}1, V_{L}, and C_{L}, of a canonical Fab and the complementarity-determining regions (CDRs) within V_{H} and V_{L} that form the antigen binding site. The two Fabs in the 3BNC60 asymmetric unit were almost identical; however, the conformation of residues 74-78 in the loop connecting strands D and E varied slightly due to different chemical environments formed by crystal lattice contacts.

[0200] Superimposition of the V_{H} domains from 3BNC60 and VRC01 in the VRC01-gp120 co-crystal structure (T. Zhou et al., Science 329, 811 (Aug. 13, 2010)) yielded a root mean square deviation (rmsd) of 1.3 Å (calculated for 111 Cα atoms) with major differences confined to CDR2 residues 58-65 (3BNC60 numbering). Superimposing the structures indicated conservation of the recognition interface with gp120. For example, Arg72_{3BNC60} adopted a similar conformation as Arg71_{VRC01}, which mimics an important salt bridge normally formed between Arg59_{CD4} and Asp368_{gp120}. In addition, Trp47_{3BNC60} adopted the same conformation as Trp47_{VRC01}, a residue that contacts gp120 and is involved with a complex network of interactions of aromatic and aliphatic residues that stabilize the conformations of CDRH3 and CDRL3. Gln65_{3BNC60}, which corresponds to Gln64_{VRC01}, is within the residue segment (residues 58-65) that differs in structure from VRC01. The conformation of this region of 3BNC60, which is involved in a lattice contact in the crystals, is likely to change upon binding gp120, as it would clash with the CD4-binding loop on gp120.

[0201] Superimposing the 3BNC60 and VRC01 V_{L} domains yielded an rmsd of 0.9 Å (calculated for 95 Cα atoms) and showed that some of gp120-contacting residues are structurally conserved; Tyr91_{3BNC60} and Glu91a_{3BNC60} adopted similar conformations as Tyr91_{VRC01} and Glu96_{VRC01}, which engaged loop D of gp 120 via polar interactions. Overall, these structural comparisons suggested that 3BNC60 binds gp120 with the same architecture as observed for the binding of VRC01.

### Example 10

### HIV Antibody Consensus Sequence

[0202] The foregoing experiments defined a class of agonistic anti-CD4bs antibodies, HAADs, that shares IgV_{H} and IgV_{L} consensus sequences including 8 of the contact residues between VRC01 and the HIV spike (FIGS. 3A and B). In five different donors, selected for their high level serologic anti-HIV activity, these antibodies originated from only 2 closely related IgV_{H} and 3 IgV_{L} germline genes that conform to the HAAD consensus: V_{H}1-2 and V_{H}1-46 differ by only 7 amino acids, none of which are part of the consensus (FIG. 3A). Despite extensive somatic hypermutation, the consensus residues were retained in their germline form.

[0203] The only exception to the consensus, 8ANC195, differed from the others in a number of ways that suggest that it may have a unique mode of antigen recognition: absence of the Arg in the heavy chain that mimics the critical Arg59_{CD4} and Asp368_{gp120} contact site; unique neutralizing pattern; and inability to facilitate anti-CD4i antibody binding. This antibody is one of two distinct highly active antibodies arising in one patient, lending additional support to the idea that serologic neutralizing activity is combinatorial.

TABLE A

| Seq ID | | |
|---|---|---|
| No. | Antibody | Heavy Chain Amino Acid Sequence |
| 5 | 8A253HC | QGQLVQSGGGLKKPGTSVTISCLASEYTFNEFVIHWIRQAPGQGP |
| | | LWLGLIKRSGRLMTAYNFQDRLSLRRDRSTGTVFMELRGLRPDDT |
| | | AVYYCARDGLGEVAPDYRYGIDVWGQGSTVIVTAASTKG |
| 6 | 8A275HC | QGLLVQSGGGVKKLGTSVTISCLASEYTFNEFVIHWIRQAPGQGPL |
| | | WLGLIKRSGRLMTSYQFQDRLSLRRDRSTGTVFMELRGLRVDDT |
| | | AVYYCARDGLGEVAPAYLYGIDAWGQGTTVIVTSASTKG |
| 7 | 8ABM11 | FQGHLVQSGGGVKKPGTSVTLSCLASEYTFTEFTIHWIRQAPGQG |
| | | PLWLGLIKRSGRLMTSYRFQDRLSLRRDRSTGTVFMELRSLRTDD |
| | | TAVYYCARDGLGELAPAYHYGIDAWGQGTTVIVTSASTS |
| 8 | 8ABM12 | QGHLVQSGGGVKKLGTSVTISCLASEYTFNEFVIHWIRQAPGQGP |
| | | LWLGLIKRSGRLMTSYQFQDRLSLRRDRSTGTVFMELRGLRVDDT |
| | | AVYYCARDGLGEVAPAYLYGIDAWGQGTTVIVTSAST |
| 9 | 8ABM13 | QGHLVQSGGGVKKLGTSVTISCLASEDTFNEFVIHWIRQAPGQGP |
| | | LWLGLIKRSGRLMTSYQFQDRLSLRRDRSTGTVFMELRGLRVDDT |
| | | AVYYCARDGLGEVAPAYLYGIDAWGQGTTVIVTSASTS |
| 10 | 8ABM14 | GHLVQSGGGXKKPGTSVTISCLASEYTFTEFTIHRIRQAPGQGPL |
| | | WLGLIKGSGRLMTSYGFQDRLSLRRDRSTGTVFMELRSLRTDDTA |
| | | VYYCARDGLGELAPAYHYGIDVWGQGTTVIVTSASTS |
| 11 | 8ABM20 | GVHFQGHLVQSGGGVKKPGSSVTISCLASEYTFTEFTIHWIRQAP |
| | | GQGPLWLGLIKRSGRLMTSYRFQDRLSLRRDRSTGTVFMELRGL |
| | | RIDDTAVYYCARDGLGEVAPAYLYGIDVWGQGTTVIVTSASTS |
| 12 | 8ABM24 | FQGQLVQSGGGVKKPGSSVTISCLASEYTFTEFTIHWIRQAPGQG |
| | | PLWLGLIKRSGRLMTSYGFQDRLSVRRDRSTGTVFMELRSLRTDD |
| | | TAVYYCARDGLGELAPAYHYGIDVWGQGTTVIVTSASTS |
| 13 | 8ABM26 | QGQLVQSGGGVKKLGTSVTISCLASEYTFNEFVIHWIRQAPGQGP |
| | | LWLGLIKRSGRLMTSYQFQDRLSLRRDRSTGTVFMELRGLRVDDT |
| | | AVYYCARDGLGEVAPAYLYGIDAWGQGTTVIVTSASTS |
| 14 | 8ABM27 | QGHLVQSGXEVKKPGSSVKVSCKASGGTFSXYAIGWVRQAPGQ |
| | | GLEWMGGIIPILGTTNYAQRFQGGVTITADESTNTAYMDVSSLRSD |
| | | DTAVYYCAKAPYRPRGSGNYYYAMDVWGQGTTVIVSSASTS |
| 15 | 8ANC105HC | QGHLVQSGGGVKKLGTSVTISCLASEYTFNEFVIHWIRQAPGQGP |
| | | LWLGLIKRSGRLMTSYQFQDRLSLRRDRSTGTVFMELRGLRVDDT |
| | | AVYYCARDGLGEVAPAYLYGIDAWGQGTTVIVTSASTKG |
| 16 | 8ANC116HC | QGQLVQSGGGVKKLGTSVTISCLASEYTFNEFVIHWIRQAPGQGP |
| | | LWLGLIKRSGRLMTSYQFQDRLSLRRDRSTGTVFMELRGLRVDDT |
| | | AVYYCARDGLGEVAPAYLYGIDAWGQGTTVIVSSASTKG |
| 17 | 8ANC127HC | QGHLVQSGGGVKKLGTSVTISCLVSEYTFNEFVIHWIRQAPGQGP |
| | | LWLGLIKRSGRLMTSYQFQDRLSLRRDRSTGTVFMELRGLRVDDT |
| | | AVYYCARDGLGEVAPAYLYGIDAWGQGTTVIVTSASTKG |
| 18 | 8ANC131HC | QGQLVQSGGGLKKPGTSVTISCLASEYTFNEFVIHWIRQAPGQGP |
| | | LWLGLIKRSGRLMTAYNFQDRLRLRRDRSTGTVFMELRGLRPDDT |
| | | AVYYCARDGLGEVAPDYRYGIDVWGQGSTVIVTAASTKG |
| 19 | 8ANC134HC | QGQLVQSGGGVKKPGTSVTISCLASEYTFNEFVIHWIRQAPGQGP |
| | | VWLGLIKRSGRLMTSYKFQDRLSLRRDRSTGTVFMELRGLRLDDT |
| | | AVYYCARDGLGEVAPAYLYGIDAWGQGSTVIVTSASTKG |
| 20 | 8ANC13HC | QGQLVQSGGGVKKPGASVTISCLASEYTFNEFVIHWIRQAPGQGP |
| | | LWLGLIKRSGRLMTAYKFQDRLSLRRDRSTGTVFMELRGLRPEDT |
| | | AVYYCARDGLGEVAPDYRYGIDVWGQGSTVIVSAASTKG |
| 21 | 8ANC171HC | QGHLVQSGGGVKKLGTSVTISCLASEYTFNEFVIHWIRQAPGQGP |
| | | LWLGLIKRSGRLMTSYQFQDRLSLRRDRSTGTVFMELRGLRVDDT |
| | | AVYYCARDGLGEVAPAYLYGIDAWGQGTTVIVTSASTKG |
| 22 | 8ANC18 | GVHFQGHLVQSGGGVKKPGSSVTISCLASEYTFTEFTIHWIRQAP |
| | | GQGPLWLGLIKRSGRLMTSYRFQDRLSLRRDRSTGTVFMELRGL |
| | | RIDDTAVYYCARDGLGEVAPAYLYGIDVWGQGSTVIVTSASTS |
| 23 | 8ANC182HC | QGQLVQSGGGVKKPGTSVTISCLASEYTFTEFTIHWIRQAPGQGP |
| | | LWLGLIKRSGRLMTAYRFQDRLSLRRDRSTGTVFMELRNLRMDDT |
| | | AVYYCARDGLGELAPAYQYGIDVWGQGTTVIVSSASTKG |
| 24 | 8ANC192HC | QGHLVQSGGGVKKLGTSVTISCLASEYTFNEFVIHWIRQAPGQGP |
| | | LWLGLIKRSGRLMTSYQFQDRLSLRRDRSTGTVFMELRGLRVDDT |
| | | AVYYCARDGLGEVAPAYLYGIDAWGQGTTVIVTSASTKG |
| 25 | 8ANC22HC | QGHLVQSGGGVKKLGTSVTISCLASEDTFNEFVIHWIRQAPGQGP |
| | | LWLGLIKRSGRLMTSYQFQDRLSLRRDRSTGTVFMELRGLRVDDT |
| | | AVYYCARDGLGEVAPAYLYGIDAWGQGTTVIVTSASTKG |
| 26 | 8ANC26HC | QGQLVQSGGGVKKPGTSVTISCLASEYTFNEFVIHWIRQAPGQGP |
| | | VWLGLIKRSGRLMTSYKFQDRLSLRRDRSTGTVFMELRGLRLDDT |
| | | AVYYCARDGLGEVAPAYLYGIDAWGQGSKVIVTPASTKG |
| 27 | 8ANC2HC | QGQLVQSGGGVKKLGTSVTIPCLASEYTFNEFVIHWIRQAPGQGP |
| | | LWLGLIKRSGRLMTSYQFQDRLSLRRDRSTGTVFMELRGLRVDDT |
| | | AVYYCARDGLGEVAPAYLYGIDAWGQGTTVIVTSASTKG |
| 28 | 8ANC30HC | QGQLVQSGGGVKKLGTSVTISCLASEYTFNEFVIHWIRQAPGQGP |
| | | LWLGLIKRSGRLMTSYQFQDRLSLRRDRSTGTVFMELRGLRVDDT |
| | | AVYYCARDGLGEVAPAYLYGIDAWGQGTTVIVTSASTKG |
| 29 | 8ANC37HC | QGHLVQSGGGVKKLGTSVTISCLASEYTFNEFVIHWIRQAPGQGP |
| | | LWLGLIKRSGRLMTSYQFQDRLSLRRDRSTGTVFMELRGLRVDDT |
| | | AVYYCARDGLGEVAPAYLYGIDAWGQGTTVIVTSASTKG |
| 30 | 8ANC40HC | QGHLVQSGGGVKKLGTSVTISCLASEYTFNEFVIHWIRQAPGQGP |
| | | LWLGLIKRSGRLMTSYQFQDRLSLRRDRSTGTVFMELRGLRVDDT |
| | | AVYYCARDGLGEVAPAYLYGIDAWGQGTTVIVTSASTKG |
| 31 | 8ANC41HC | QGQLVQSGGGVKKTGTSVTISCLASEYTFTEFTIHWIRQAPGQGP |
| | | LWLGLIKRSGRLMTANRFQDRLSLRRDRSTGTVFMELRSLRIDDT |
| | | AVYYCARDGLGELAPAYHYGIDVWGQGTTIIVTSASTKG |
| 32 | 8ANC45HC | QGQLVQSGGGVKKTGTSVTISCLASEYTFTEFTIHWIRQAPGQGP |
| | | LWLGLIKRSGRLMTANRFQDRLSLRRDRSTGTVFMELRSLRIDDT |
| | | AVYYCARDGLGELAPAYHYGIDVWGQGTTIIVTSASTKG |
| 33 | 8ANC50HC | QGQLVQSGGGVKKPGTSVTISCLASEYTFTEFTIHWIRQAPGQGP |
| | | LWLGLIKRSGRLMTAYRFQDRLSLRRDRSTGTVFMELRNLRMDDT |
| | | AVYYCARDGLGELAPAYQYGIDVWGQGTTVIVSSASTKG |
| 34 | 8ANC53HC | QGQLVQSGGGGKKLGTSVTISCLASEYTFNEFVIHWIRQAPGQGP |
| | | LWLGLIKRSGRLMTSYQFQDRLSLRRDRSTGTVFMELRGLRVDDT |
| | | AVYYCARDGLGEVAPAYLYGIDAWGQGTTVIVSSASTKG |
| 35 | 8ANC88HC | QGQLVQSGGGVKKPGTSVTISCLASEYTFNEFVIHWIRQAPGQGP |
| | | LWLGLIKRSGRLMTSYKFQDRLNLRRDRSTGTVFMELRGLRPDDT |
| | | AVYYCARDGLGEVAPDYRYGIDVWGQGSTVIVTAASTKG |
| 36 | 8ANC103HC | QVQLQQWGSGLLKPSETLSLTCAVYGGSFRSYYWNWIRQSPGK |
| | | GLEWIGEVSHSGSTNYNPALKSRVTISVDTSKNQFSLKVKSVTAAD |
| | | TALYYCSRGRGKRCSGAYCFAGYFDSWGQGGLVVVSSASTKG |
| 37 | 8ANC106HC | EVQLVESGGGVVEPGESLRLSCAASGFTFRSYDMFWVRQATGKS |
| | | LEWVSAIGIAGDTYYSGSVKGRFTISRENARTSLYLQLSGLRVEDS |
| | | AVYFCVRGSPPRIAATEYNYYYGLDVWGQGTTVSVFSASTKG |
| 38 | 8ANC107HC | VVQLVQSGAEVRKPGSSLKVSCKSSGGTFSRYVVNWVRQAPGQ |
| | | GLEWMGGMIPIFGIAKYAQKFQDRVTMTADESKNTVYLDFSSLRS |
| | | DDTAVYYCARDRGDTRLLDYGDYEDERYYYGMDVWGQGTTVIVS |
| | | SASTKG |
| 39 | 8ANC108HC | QVQLVQSGAEVRKPGSSLKVSCKSSGGTFSRYVVNWVRQAPGQ |
| | | GLEWMGGIIPIFGIAKYAQKFQDRVTMTADEPKNTVYLDFNSLRSD |
| | | DTAVYYCARDRGDTRLLDYGDYEDERYYYGMDVWGQGTTVIVSS |
| | | ASTKG |
| 40 | 8ANC109HC | EVQLVESGGGLVKPGGSLRLSCAASGFSFSEHYMSWIRLAPGKG |
| | | LEWLSYISSSTRTTYSADSVRGRFTISRDTAKQLLFLHMSSLRAED |
| | | TAVYYCVRLYGGINGWFDQWGQGTLVSVSSASTKG |
| 41 | 8ANC10HC | QVQLVQSGAEVKKPGSSVKVSCKTSGGSFSNYAFSWVRQAPGE |
| | | GLEWMGRIIPIFGTAKYTQKLQGRVTITADKFTSTVYMELSSLRSE |
| | | DTAIYYCASLHQGPIGYTPWHPPPRAPLGQSVCG |
| 42 | 8ANC111HC | QVQLVESGAEVKKPGASVKVSCKASGYTFTSHDINWVRQATGQG |
| | | LEWMGWMNPNSGDTGYAHKFQGRVTMTRNTPISTAYMELSSLR |
| | | SEDTAVYYCARGRATSRNTPWAHYYDSSGYYGAGDYWGQGTLV |
| | | TVSSASTKG |
| 43 | 8ANC112HC | QVQLVESGGGVVQPGRSLRLFCAASGFAFNTYGMHWVRQAPGK |
| | | GLEWVAVTWHDGSQKYYADSVKGRFTISRDNSKNTLYLQMNSLR |
| | | AEDTAIYYCASDQGGFDDSSGYFAPGGMDVWGRGTTVIVSSAPT |
| | | KG |
| 44 | 8ANC113HC | QVQLVESGAELRKPGESLEISCKASGYSFSSHWIGWARQMPGKG |
| | | LEWMGIIYPGDSNTIYSPSFQGQVTISADKSINTAYLQWSSLKASD |
| | | TAMYFCASNYHDYFYWGQGTLVTVSSASTKG |
| 45 | 8ANC114HC | EVQLVESGAEVKKPGSSVKVSCKASGGTFSTYAFSWVRQAPGQG |
| | | LEWMGGIIPIFGTENYAQKFQGRVTITADKSTSTAYMELSSLRSED |
| | | TAVYYCARDRSSAIGYCSSISCYKGSFDIWGQGTMVTVSSASTKG |
| 46 | 8ANC115HC | QVQLVQSGAEVRKPGSSLKVSCKSSGGTFSRYVVNWVRQAPGQ |
| | | GLEWMGGIIPIFGIAKYAQKFQDRVTMTADEPKNTVYLDFNSLRSD |
| | | DTAVYYCARDRGDTRLLDYGDYEDERYYYGMDVWGQGTTVIVSS |
| | | ASTKG |
| 47 | 8ANC117HC | EVQLVQSGAEVKKPGSSVKVSCKASGGTFSTYAFSWVRQAPGQ |
| | | GLEWMGGIIPIFGTENYAQKFQGRVTITADKSTSTAYMELSSLRSE |
| | | DTAVYYCARDRSSAIGYCSSISCYKGSFDIWGQGTMVTVSSASTKG |
| 48 | 8ANC11HC | QVFVQLVQSGGGLVQPGGSVRLSCTASGFLFSTYSMNWVRQAP |
| | | GKGLEWVSSISTTSNYIYYADSVKGRFTISRSNGQGSLYLQLNSLR |
| | | VEDTAVYYCARDTKVGAPRQDCYAMDLWGQRDHGHRLLSFHQG |
| | | PIGLPPGALLQ |
| 49 | 8ANC121HC | QVQLLESGPGLVTPSGTLSLACAVSGASISSSHWWTWVRQSPGK |
| | | GLEWIGEIDRRGTTNYNPSLRSRVTILLDNSKNQFSLSLRSVTAAD |
| | | TAVYYCTKVYAGLFNERTYGMDVWGHGTTVLVSSASTKG |
| 50 | 8ANC126HC | QVQLVESGAEVRKPGSSLKVSCKSSGGTFSRYVVNWVRQAPGQ |
| | | GLEWMGGIIPIFGIAKYAQKFQDRVTMTADESKNTVYLDFSSLRSD |
| | | DTAVYYCARDRGDTRLLDYGDYEDERYYYGMDVWGQGTTVIVSS |
| | | ASTKG |
| 51 | 8ANC130HC | QVQLLQSGAEVKKPGASVKVSCKVSGYTLTELSINWVRQAPGKGL |
| | | EWMGGFDPEDDEAIYEPKFQGRLTMTEDTSTDTAYMELSSLRSE |
| | | DTAVYYCATADPFKVAQDEGLYVIFDYWGQGTLVTVSSASTKG |
| 52 | 8ANC132HC | QVQLVQSGTEVQKPGASVKVSCKTSGYTFSKYYIHWVRQAPGQG |
| | | LEWVGRINTDSGGTDYAEKFQGRVTMTRDTSITTVYLEMRGLTSD |
| | | DTAAFYCARGPPHAGGWTIYYYGLDVWGQGTSVIVSSASTKG |
| 53 | 8ANC133HC | QVQLVQSGAEVKKPGASVKVSCKVSGHTLSELSINWVRHVPGKG |
| | | LEWMGGLDPEDGEAIHEPKFQGRLTMTEDTSTDTAYVELSSLRSE |
| | | DTAMYYCATADPFKVAQDEGLYVIFDYWGQGTLVTVSSASTKG |
| 54 | 8ANC136HC | EVQLVESGGGVVQPGRSLRLSCAASGFTFSHHGIHWVRQAPGEG |
| | | LEWVAVISEDGTNIHYEDSVRGRFTISRDNSKNTVDLQMNSLRAE |
| | | DTAVYYCASLISMRDGDAFDLWGQGTRVTVSSASTKG |
| 55 | 8ANC137HC | QVQLVQSGAEVRKPGSSLKVSCKSSGGTFSRYVVNWVRQAPGQ |
| | | GLEWMGGIIPIFGIAKYAQKFQDRVTMTADESKNTVYLDFSSLRSD |
| | | DTAVYYCARDRGDTRLLDYGDYEDERYYYGMDVWGQGTTVIVSS |
| | | ASTKG |
| 56 | 8ANC139HC | QVQLVQSGGGLVKPGGSLRLSCAASGFTFSSYSMNWVRQAPGK |
| | | GLEWVSSISSSSSYIYYADSVKGRFTISRDNAKNSLYLQMNSLRAE |
| | | DTAVYYCAREGSYYYGMDVWGQGTTVTVSSASTKG |
| 57 | 8ANC140HC | EVQLVQSGGGLVQPGRSLRLSCAASGFTFDDYAMHWVRQAPGK |
| | | GLEWVSGISWNSGTIGYADSVRGRFTISRDDAKSSLYLQMNSLRT |
| | | EDTALYYCAKDGWVGSGSSTLRGSDYWGQGTLVTVSSASTKG |
| 58 | 8ANC142HC | QIHLVQSGTDVKKPGSSVTVSCKAYGVNTFGLYAVNWVRQAPGQ |
| | | SLEYIGQIWRWKSSASHHFRGRVLISAVDLTGSSPPISSLEIKNLTS |
| | | DDTAVYFCTTTSTYDQWSGLHHDGVMAFSSRGQGTLISVSAAST |
| | | KGPSVFPLAPSSKSTYGLAHVL |
| 59 | 8ANC143HC | QVQLVQSGAEVRKPGSSLKVSCKSSGGTFSRYVVNWVRQAPGQ |
| | | GLEWMGGIIPIFGIAKYAQKFQDRVTMTADEPKNTVYLDFNSLRSD |
| | | DTAVYYCARDRGDTRLLDYGDYEDERYYYGMDVWGQGTTVIVSS |
| | | ASTKG |
| 60 | 8ANC144HC | QLQLQESGPGLVKPWETLVLTCSVSGGSISSGDYYWGWIRQSPG |
| | | KGPEWIGNIFYSSGNTYYNTSLKSRVTISVDVSKNRFSLKLTSMTA |
| | | ADTAVYYCGRLSNKGWFDPWGQGTLVSVSSASTKG |
| 61 | 8ANC145HC | QVQLLESGGGLVQRGGSLRLSCTASGFVFNNYWMTWVRQAPGN |
| | | GLEWVANIDQDGSEKHYLDSVKGRFTISRDNAKNSLYLQMNSLRA |
| | | EDTAIYYCARVRFKVTAWHRFDSWGQGDLVTVSSTSTKG |
| 62 | 8ANC146HC | LVQLLQSGAEVKKPGASVKVSCKVSGYTLTELSIHWVRQAPGKGL |
| | | EWMGGFDPEDDEAIYEPKFQGRLTMTEDTSTDTAYMELSSLRSE |
| | | DTAVYYCATADPFKVAQDEGLYVIFDYWGQGTLVTVSSASTKG |
| 63 | 8ANC147HC | QVQLVESGGGLGQPGGSLRLSCAASGFTFRNYAMSWVRQAAGK |
| | | GLEWVSGVSGGGDTTYYGDSVKGRFTISRDNSKNTLYLQMNNLR |
| | | AEDTAVYYCAKDKGVWGSSDFDYWGQGTLVTVSSASTKG |
| 64 | 8ANC148HC | QVHLVQSGAEVKKPGASVRVSCKASGYTFTTYGISWVRQAPGQG |
| | | LEWMGWISAHSGDTNYAQKLQARVTMTTDTSTNTAYMELRSLTS |
| | | DDTAVYYCARDRPRHYYDRGGYYSPFDYWGQGTLVTVSSASTKG |
| 65 | 8ANC149HC | QVQLVESGAEVKKPGSSVKVSCKASGGTFNIFAFSWVRQAPGQG |
| | | LEWMGGIIPIFASPNYAQRFQGRVTITADESTSTVHMELSSLRSED |
| | | TAIYYCAKDAHMHIEEPRDYDYIWGTSPYYFDYWGQGTLVTVSSA |
| | | STKG |
| 66 | 8ANC14HC | QVQLVQSGAEVKKPGASVKVSCKVSGYTLTELSIHWVRQAPGKG |
| | | LEWMGGFDSEDGEAFYKQNFQGRVTMTEDTSTDTAYMELRRLR |
| | | SEDTAVYYCATADRFKVAQDEGLFVIFDYWGQGTLVTVSSASTKG |
| 67 | 8ANC150HC | QVQLLQSGGEVKKPGASVKVSCKVSGYTLTELSIHWVRQAPGKG |
| | | LEWMGGFDPEDDEAIYEPKFQGRLTMTEDTSTDTAYMELSSLRSE |
| | | DTAVYYCATADPFKVAQDEGLYVIFDYWGQGTLVTVSSASTKG |
| 68 | 8ANC151HC | EVQLVESGGGLVQPGGSLRLSCAASGFTFSSYSMNWVRQAPGK |
| | | GLEWVSYISGSSYTIYYADSVRGRFTISRDNAKNSLYLQMNSLRDE |
| | | DTAVYFCARATPPNPLNLYNYDSSGSSFDYWGQGTLVTVSSAST |
| | | KG |
| 69 | 8ANC153HC | QVQLVQSGAEVRKPGSSLKVSCKSSGGTFSRYVVNWVRQAPGQ |
| | | GLEWMGGMIPIFGIAKYAQKFQDRVTMTADESKNTVYLDFSSLRS |
| | | DDTAVYYCARDRGDTRLLDYGDYEDERYYYGMDVWGQGTTVIVS |
| | | SASTKG |
| 70 | 8ANC154HC | QVQLVESGAEVRKPGSSLKVSCKSSGGTFSRYVVNWVRQAPGQ |
| | | GLEWMGGIIPIFGIAKYAQKFQDRVTMTADEPKNTVYLDFNSLRSD |
| | | DTAVYYCARDRGDTRLLDYGDYEDERYYYGMDVWGQGTTVIVSS |
| | | ASTKG |
| 71 | 8ANC155HC | QVQLVQSGAEIKKPGESLKISCKASGYTFNDYWIGWVRQMPGKG |
| | | LEWMGIFYPDDSDSNYSPSFQGRVTISADKSITTAYLQWSTLKASD |
| | | SAMYFCARLLGDSGAFDIWGQGTMVIVSSASTKG |
| 72 | 8ANC156HC | EVQLVESGAEVRKPGSSLKVSCKSSGGTFSRFVVNWVRQAPGQ |
| | | GLEWMGGMIPIFGIAKYAQKFQDRVTMTADESKNTVYLDFSSLRS |
| | | DDTAVYYCARDRGDTRLLDYGDYEDERYYYGMDVWGQGTTVIVS |
| | | SASTKG |
| 73 | 8ANC157HC | QVQLVQSGAEVKKPGSSVKVSCKASGGTFSTYAFSWVRQAPGQ |
| | | GLEWMGGIIPIFGTENYAQKFQGRVTITADKSTSTAYMELSSLRSE |
| | | DTAVYYCARDRSSAIGYCSSISCYKGSFDIWGQGTMVTVSSASTKG |
| 74 | 8ANC158HC | QVQLVQSGAEVRKPGSSLKVSCKSSGGTFSRFVVNWVRQAPGQ |
| | | GLEWMGGMIPIFGIAKYAQKFQDRVTMTADESKNTVYLDFSSLRS |
| | | DDTAVYYCARDRGDTRLLDYGDYEDERYYYGMDVWGQGTTVIVS |
| | | SASTKG |
| 75 | 8ANC160HC | QVQLVQSGGGVVQPGRSLRLSCAASGFTFSHHGIHWVRQAPGE |
| | | GLEWVAVISEDGTNIHYEDSVRGRFTISRDNSKNTVDLQMNSLRA |
| | | EDTAVYYCASLISMRDGDAFDLWGQGTRVTVSSASTKG |
| 76 | 8ANC161HC | EVQLVQSGGGLVKPGGSLRLSCAASGFTFKNAWMSWVRQAPGK |
| | | GLEWVGHIKSKTDGGTIDYAAPVKGRFTISRDDSKNTLYLQMNSLK |
| | | IEDTAVYYCTTDIGSGRGWDFHYYDSNDWGQGTLVTVSSASTKG |
| 77 | 8ANC162HC | EVQLVQSGGGVVQPGRSLRLSCVVSGFTFSSFTFHWVRQAPGK |
| | | GLEWVAGMSFHATYIYYADSVKGRFTISRDDSQDTLYLEMDSLRS |
| | | EDTAIYYCARDPGIHDYGDYAPGAFDYWGQGSPVTVSSASTKG |
| 78 | 8ANC163HC | LVQLVQSGAEVKKPGASVKVSCKVSGHTLSELSINWVRHVPGKGL |
| | | EWMGGLDPEDGEAIHEPKFQGRLTMTEDTSTDTAYSTLSVWAPV |
| | | AAAMYYCATADPFKVAQDEGLYVIFDYWGQGTLVTVSSASTKG |
| 79 | 8ANC164HC | EVQLVESGAEVKKPGSSVKVSCKASGGTFSSYSISWVRQAPGQG |
| | | LEWMGGIIPIFATTHYGQKFQGRIKITADKSTSTAYMELSRLRSEDT |
| | | AVYYCARDREFYFYGMDVWGQGTTVTVSSASTKG |
| 80 | 8ANC165HC | QVQLQQWGAGLLKPSETLSLTCAVYAGSFSGYYWTWIRQPPGKG |
| | | LEWIGEVNHGGSTNYNPSLKSRVTLSVDTSKNQFSLKLTSVTAAD |
| | | TAVYYCARVSRYDFWSGNYGSYGLDVWGQGTTVTVSSASTKG |
| 81 | 8ANC166HC | WQLVQSGAEVRKPGSSLKVSCKSSGGTFSRFVVNWVRQAPGQ |
| | | GLEWMGGMIPIFGIAKYAQKFQDRVTMTADESKNTVYLDFSSLRS |
| | | DDTAVYYCARDRGDTRLLDYGDYEDERYYYGMDVWGQGTTVIVS |
| | | SASTKG |
| 82 | 8ANC168HC | LVQLVQSGAEVKKPGASVKVSCKVSGYSLTELSIHWVRQAPGKGL |
| | | EWMGGFDSEDGEAIYKQNFQGRVTMTEDTSTDTAYMELSRLRSE |
| | | DTAVYYCATADPFKVAQDEGLFVIFDYWGQGTTGHRLLSLHQGP |
| | | HRLYSLGTLLSRAPIVQTHMA |
| 83 | 8ANC169HC | QVQLVQSGAEVKKPGSSVKVSCKASGGTFSTYAFSWVRQAPGQ |
| | | GLEWMGGIIPIFGTENYAQKFQGRVTITADKSTSTAYMELSSLRSE |
| | | DTAVYYCARDRSSAIGYCSSISCYKGSFDIWGQGTMVTVSSASTKG |
| 84 | 8ANC16HC | QVQLVQSGAEVKKPGSSVKVSCKASGGTFSTYAFSWVRQAPIEG |
| | | LEWMGGIIPIFGTENYAQKFQGRVTITADKSTSTAYMELSSLRSED |
| | | TAVYYCARDRSSAIGYCSSISCYKGSFDIWGQGTMVTVSSASTKG |
| 85 | 8ANC173HC | QVQLVQWGAGLLKPLETLSLTCAVYGGSFNGYFWSWIRQTPGKG |
| | | LEWIGEINHGGSANFNPSLKSRVTMSVDTSKNQFSLKLASVTAAD |
| | | TAIYYCARGRITMVRGDPQRGGVRMDVWGQGTSVTVSSASTKG |
| 86 | 8ANC174HC | QVQLMQSGAEVKRPGASVKVSCKAFRHSLNNLGISWIRRAPGRG |
| | | LEWLGWINVYEGNTKYGRRFQGRVTMTTDRSTNTVSMELRSLTS |
| | | DDTAVYYCARDNHFWSGSSRYYYFGMDVWGQGTTVIVSSASTKG |
| 87 | 8ANC175HC | QVQLVQSGGGLVQPGESLRLSCTASGFTFSSYNMNWVRQAPGK |
| | | GLEWISYISDKSKNKYYADSVRGRFTISRDNAQNSLFLQMSSLRDE |
| | | DTAVYYCTREGPQRSFYFDYWGQGIQVTVSSASTKG |
| 88 | 8ANC176HC | QVQLQESGPGLVKPSETLSLTCTVSGGSISNHYWSWIRQPPGKGL |
| | | EWIGYIYHSGNINYKSSLKSRATISIDTSNNQFSLKLSSVIAADTAVY |
| | | YCARNFGPGSPNYGMDVWGQGTTVTVSSASTKG |
| 89 | 8ANC177HC | VVQLVQSGPGLVKPSQTLSLTCTVSGGSISSGDFYWSWIRQPPGK |
| | | GLEWIGYIYYSGSTYYNPSLKSRLTISVDTSKNQFSLRLSSVTAADT |
| | | AVYYCARDLNSRIVGALDAFDIWGQGTMVTVSSASTKG |
| 90 | 8ANC178HC | QVQLVESGGALVQPGGSLRLSCAASGFSFSSYAMSWVRQAPGK |
| | | GLEWVSAISRSGGSTYYADSVKGRFTISIDNSNNTLYLQMNSLRVE |
| | | DTAVYYCAKREAFYYGAGGYGMDVWGQGTTVTVSSASTKG |
| 91 | 8ANC179HC | EVQLVESGGGLVKPGGSLRLSCEASGFTFTNAWMNWVRQAPGK |
| | | GLEWVGRIKSQTHGGTTRYAAPVKGRFTISRDDSKHTLYLQMDRL |
| | | TTEDTAVYYCTGTITGSTFYYYGMDVWGQGTTVTVSPASTKG |
| 92 | 8ANC17HC | EVQLVESGGGLLQPGGSLRLSCAASGFSFNDFEMNWVRQAPGK |
| | | GLEWVSYISNDGTMIHYADSVKGRFTISRDNAKKSLFLQMNSLRA |
| | | EDTAVYYCARLAEVPPAIRGSYYYGMDVWGQGTTVTVASASTKG |
| 93 | 8ANC180HC | QVQLQESGPGLLRPLETLSLTCSVSGGSIRGYFWSWVRQPAGRG |
| | | LEWIGRIYSSGTTRFNPSLKSRVRLSIDTAKSEVSLNITSVTAADSA |
| | | SYFCAGTSPVHGGLDLWGLGLRVTVSSASTKG |
| 94 | 8ANC181HC | HLVQSGTEVKKPGSSVTVSCKAYGVNTFGLYAVNWVRQAPGQSL |
| | | EYIGQIWRWKSSASHHFRGRVLISAVDLTGSSPPISSLEIKNLTSDD |
| | | TAVYFCTTTSTYDQWSGLHHDGVMAFSSWGQGTLISVSAASTKG |
| 95 | 8ANC184HC | EVQLVQSGAEVKKPGASVKVSCKVSGYTLTELSIHWVRQAPGKGL |
| | | EWMGGFDPEDDEAIYEPKFQGRLTMTEDTSTDTAYMELSSLRSE |
| | | DTAVYYCATADPFKVAQDEGLYVIFDYWGQGTLVTVSSASTKG |
| 96 | 8ANC185HC | QVQLVESGGGLVQPGGSLRLSCAASGFTFSTHWMHWVRQAPGK |
| | | GLVWVSRIHSDGRSTSYADSVKGRFTISRDNAKNTLYLQMNSLRA |
| | | EDTAVYYCARGAAVFGVVIIGGMDLWGQGTTVTVSSASTKG |
| 97 | 8ANC186HC | EVQLVESGGGVVQPGGSLRLSCAASGFMFKNYAMHWVRQPPGK |
| | | GLEWVAVIWYGGRDQNYADSVKGRFTISRDDSDNTLYLQMNSLR |
| | | AGDTAVYFCARNSQVGRLMPAAGVWGQGTLVTVSSASTKG |
| 98 | 8ANC187HC | EVQLVESGGGLIQRGGSLRLSCVASGFPVSDNHMSWVRQAPGK |
| | | GLEWVSIIYSDGGTYYADSVKGRFTISRDNSKNTVYLQMNSLRAT |
| | | DTAVYYCARDPGFHYGLDVWGQGTTVTVSSASTKG |
| 99 | 8ANC188HC | VVQLVESGGGLVQPGGSLRLSCAASGFAFRSYWMSWVRQAPGR |
| | | GLEWVANIKQDGSEKYYADSVKGRFTISRDNTKNSLYLQMNSLRA |
| | | EDTAVFYCASRGDRYGPIDYWGQGTLVTVSSASTKG |
| 100 | 8ANC191HC | VVQLVESGTEVKKPGSSVKVSCKASGGTFSGSDISWVRQAPGQG |
| | | LEWMGGIIPMFDIENHAEKFRGRLTITAVKSTGAAYMELSSLRSED |
| | | AAVYYCARSSGNYDFAYDIWGQGTRVIVSSASTKG |
| 101 | 8ANC193HC | EVQLVQSGAEVKKPGSSVKVSCKASGGTFSTYAFSWVRQAPGQ |
| | | GLEWMGGIIPIFGTENYAQKFQGRVTITADKSTSTAYMELSSLRSE |
| | | DTAVYYCARDRSSAIGYCSSISCYKGSFDIWGQGTMVTVSSASTKG |
| 102 | 8ANC194HC | EVQLVQSGGGLVQPGGSLRLSCAASGLTFRNFAMSWVRQAPGK |
| | | GLEWVSSISGSGGSTYYADSVKGRFTISRDNSKNTLYLQMNSLRG |
| | | EDTAVYFCAKGVGYDILTGLGDAFDIWGQGTVVAVSSASTKG |
| 103 | 8ANC195HC | QIHLVQSGTEVKKPGSSVTVSCKAYGVNTFGLYAVNWVRQAPGQ |
| | | SLEYIGQIWRWKSSASHHFRGRVLISAVDLTGSSPPISSLEIKNLTS |
| | | DDTAVYFCTTTSTYDKWSGLHHDGVMAFSSWGQGTLISVSAAST |
| | | KG |
| 104 | 8ANC196HC | VVQLVQSGTEVKKPGSSVKVSCKASGGTFSGSDISWVRQAPGQG |
| | | LEWMGGIIPMFDIEDHAQKFRGRLTITADKSTGAAYMELSSLRSED |
| | | AAVYYCARSSGNYDFAFDIWGQGTRLIVSSASTKG |
| 105 | 8ANC20HC | QVQLGESGGGLVEPGGSLRLSCAASGFLFSDYQMSWIRLAPGKG |
| | | LEWISFISGFGSVYYADSVEGRFTISRDNARNSLYLQMNNLRAEDT |
| | | AVYYCARAYGTGNWRGLYYYYYGMDVWGHGTTVTVSSASTKG |
| 106 | 8ANC21HC | QLQLVESGGGVVQPGRSLRLSCAASGFTFSTYTMHWVRQAPGK |
| | | GLEWVAVISYDGTNKYYADSVKGRFTISRDNSKNTLYLQMNSLRG |
| | | EDTAVYYCARSPSYYFDYWGQGTLVTVSAASTKG |
| 107 | 8ANC24HC | QVQLVQSGAEVKMPGASVKVSCKVSGYSLTELSIHWVRQAPGKR |
| | | LEWMGGFDPEDDERIYAQKFQDRVTMTEDTSTDTAYMDLNSLRS |
| | | EDTAVYYCTTGGLYCSSISCIMDVWGQGTTVIVSSASTKG |
| 108 | 8ANC25HC | QVQLVQSGAEVKKPGASVKVSCKVSGYTLTELSIHWVRQAPGKR |
| | | LEWMGGFDPEDGERIYAQKFQGRVTMTEDTSTDTAYMELNSLRS |
| | | DDTAVYYCATGGLYCSSISCIMDVWGQGTTVTVSSASTKG |
| 109 | 8ANC27HC | QVQLVQSGAEVKKPGASVKVSCKVSGYTLTELSIHWVRQAPGKG |
| | | LEWMGGFDSEDGEAIYKQNFQGRVTMTEDTSTDTAYMELSRLRS |
| | | EDTAVYYCATADRFKVAQDEGLFVIFDYWGQGNPGHRLLSLHQG |
| | | PIGLPPGTLPPKATSGHAARR |
| 110 | 8ANC31HC | QVQLVESGGGVVQPGRSLRLSCAASGFTFSSYAMHWVRQAPGK |
| | | GLEWVAVISYDGSNKYYADSVKGRFTISRDDSKSTVYLQINSLRAA |
| | | DTAVYFCAREGGLRFLEWLFWGQGTLVTVSSGESSASTKG |
| 111 | 8ANC33HC | EFQLVQSGGGLVKPGGSLRLSCTGSTFSFSSDDMNWVRQAPGK |
| | | GLEWVSSMSDSGSHIYYADFVKGRFTISRDNAKKSLYLQMNSLRA |
| | | EDTAVYYCAQSRPPQRLYGMDVWGQGTTVTVSSASTKG |
| 112 | 8ANC34HC | QVQLVQSGAEVKKPGASVKVSCKVSGYTLTELSIHWVRQAPGKG |
| | | LEWMGGFDPEDGEASFEPKFQGRLTMTEDTSTDTAYMELSSLRS |
| | | EDTAVYYCATADPFKVAQDEGLYVIFDYWGQGTLVTVSSASTKG |
| 113 | 8ANC36HC | QVQLVESGGGVVQPGKSLRLSCAASGFTFSTHAMHWVRQAPGK |
| | | GLDWVAVISHDGDNQYYADAVKGRFTISRDDSRDTVFLQMNSLRT |
| | | EDTGVYYCAADSSGSNWFDYWGQGILVTVSSASTKG |
| 114 | 8ANC38HC | EPMFQPGQSGGVVVQSGESLHLSCEASGFKFASQMMHWVRHVP |
| | | GRGLEWVALISWDGSGKLFADSVRGRFTIHRWNDRNSLYLDVKN |
| | | VRPEDAAIYYCTRNGFDVWGQGILVTVSSASTKG |
| 115 | 8ANC39HC | QVQLLQSGAEVKKPGASVKVSCKVSGYTLTELSIHWVRQAPGKGL |
| | | EWMGGFDPEDDEAIYEPKFQGRLTMTEDTSTDTAYMELSSLRSE |
| | | DTAVYYCATADPFKVAQDEGLYVIFDYWGQGTLVTVSSASTKG |
| 116 | 8ANC3HC | QVHLQESGPRLVRSSETLSLTCSVPGGSIVNPITNYYWSWIRQSP |
| | | RKGLQWIGDIYYTGTSSRNPSLDSRVSISMDVSRKQISLTLYSVTA |
| | | ADTAVHYCASQSLSWYRPSGYFESWGQGILVTVSSASTKG |
| 117 | 8ANC43HC | QVQLVQSGAEVKKPGSSMKVSCKSSGGTFSNHAISWVRQAPGK |
| | | GLEWMGGIIPMSGTTNYLQKFQGRVTITADEFATTAYMELSSLTSE |
| | | DTAVYYCARARADSHTPIDAFDIWGPGTRVIVSSASTKG |
| 118 | 8ANC46HC | QVQLVQSGTEVKKPGSSVKVSCKASGGTFSDSDIAWVRQAPGQG |
| | | LEWMGGITPMFDMAKSAQKFRGRLIITADKSTGTAYMELSSLRYE |
| | | DAAVYFCARSSGNFEFAFEIWGQGTKIIVSLASTKG |
| 119 | 8ANC48HC | QVQLVQSGAEVKKPGASVKVSCKASGYTFTSYDINWVRQATGQG |
| | | LEWMGWMNPNSGNTGYAQTFQGRVTMTRNTSISTAYMELSSLR |
| | | SEDTAVYYCARDRWLPQYYYYGMDVWGQGTTVTVSSASTKG |
| 120 | 8ANC49HC | FVQLVESGGGLVQPGGSLRLSCAASGFNFNTYWMNWVRQAPGK |
| | | GLEWVANMKEDGSEKYYVDSVKGRFTISRDNAKNSLYLQMNSLR |
| | | AEDTAVYYCARNPESRCIVGRNRGWCRYFDLWGRGSLVTVSPAS |
| | | TKG |
| 121 | 8ANC51HC | LVQLVESGGGVVQPGRSLRLSCAASGFTFSTYAMHWVRQAPGK |
| | | GLEWVAVISYDGSNKFYADSVKGRFTISRDNSKNTLYLQMNSLRA |
| | | EDTAVYYCARPKFLPGADIVVVVAATPFDYWGQGNPGHRLLSFH |
| | | QGPIGLPPG |
| 122 | 8ANC57HC | PMFQPGQSGGVVVQSGESLHLSCEASGFKFASQMMHWVRHVP |
| | | GRGLEWVALISWDGSGKLFADSVRGRFTIHRWNDRNSLYLDVKN |
| | | VRPEDAAIYYCTRNGFDVWGQGILVTVSSASTKG |
| 123 | 8ANC58HC | QVQLVQSGAEVKKPGASVKVSCKVSGHTLSELSINWVRHVPGKG |
| | | LEWMGGLDPEDGEAIHEPKFQGRLTMTEDTSTDTAYVELSSLRSE |
| | | DTAMYYCATADPFKVAQDEGLYVIFDYWGQGTLVTVSSASTKG |
| 124 | 8ANC5HC | QVQLVQSGAEVRKPGSSLKVSCKSSGGTFSRFWNWVRQAPGQ |
| | | GLEWMGGMIPIFGIAKYAQKFQDRVTMTADESKNTVYLDFSSLRS |
| | | DDTAVYYCARDRGDTRLLDYGDYEDERYYYGMDVWGQGTTVIVS |
| | | SASTKG |
| 125 | 8ANC60HC | LVQLVESGGGVVQPGKSLRLSCATSGFTFSTYGMHWVRQAPGK |
| | | GLEWVAVIWYDGSYKYYADSVKGRFTISRDNSKNTLFLQMNSLRA |
| | | EDTAMYYCGREMAVGGTKALDHWGQGTLVTVSSASTKG |
| 126 | 8ANC63HC | QVQLVQSGAEAKRPGDSVKVSCKASGYTFTEYYIHWVRQTPGQG |
| | | FEWMGIITPGAGNTTYAQKFQGRITVTRDTSAATVYMELSNLTSED |
| | | TAVYFCSRGVSFWGQGTLVTVSSASTKG |
| 127 | 8ANC65HC | QVQMVASGGGLVKPGGSLRLSCEASGFTFSDYYMSWVRQAPGK |
| | | GLEWISYITSGGNALYYADSVKGRFTISRDNAKNSLYLQMNSLRAE |
| | | DTAVYYCARDLLHAHDFGRQGTLVTVSSASTKG |
| 128 | 8ANC67HC | QVQLVESGGGVVQPGRSLRLSCATSGFTSKNYGVHWVRQAPGK |
| | | GLEWVAVIWYDGSNKFYADSVKGRFTISRDRSKNMVYLQMNSLR |
| | | VEDTAIYYCARDSVAFVLEGPIDYWGQGTLVTVSSASTKG |
| 129 | 8ANC69HC | QVQLVQSGAEVKKPGASVKVSCKASGYTFTDYYIHWVRQAPGQG |
| | | LEWMGWINPSTGGTNFVQKFLGRVTMTSDTSINTAYMELRRLKN |
| | | DDAAIYYCATYSTRQFFHYYYVTDVWGQGTTVTVSSASTKG |
| 130 | 8ANC6HC | QVQLVQSGAEVKKPGSSVKVSCRASGGSFGNYAINWVRQAPMQ |
| | | GLEWMGGIIPIFGTTNYAQNFRGRVTINADTFTNTVNMDLSSLRSE |
| | | DTAVYYCGRSINAAVPGLEGVYYYYGMAVWGQGTTVTVSSASTKG |
| 131 | 8ANC70HC | QVQLHQWGAGLLKPSDTLSLTCGILGVSPPGSLTGYYWTWIRQPP |
| | | GKGLEWIGEVYHSGSTNYNPSLASRVTISMGTTKTQFSLRLTSVTA |
| | | ADSAVYYCASGKVWGITARPRDAGLDVWGQGTTVTVTSASTKG |
| 132 | 8ANC71HC | EVQVVESGGGLVQPGGSLRLSCVASGFTFSEYWMSWVRQAPGK |
| | | GLEWVATIKRDGSEESYVDSVKGRFTISRDNAKNSLYLQMNSLRA |
| | | EDTAVYYCARVRDPNYNLHFDSWGQGTLVTVSSASTKG |
| 133 | 8ANC72HC | QVQLVESGGGLIQPGGSLRLSCEASGFAVGDINYMSWVRQAPGK |
| | | GLEWVSVLYSGGSSQYADSVKGRFTISRDNSRNTLYLQMDNLRA |
| | | EDTAVYYCARGLRVYFDLWGQGILVTVSSASTKG |
| 134 | 8ANC74HC | QVQLVQSGAEVKKPGSSVKVSCKASGGTFSTYAFSWVRQAPGQ |
| | | GLEWMGGIIPIFGTENYAQKFQGRVTITADKSTSTAYMELSSLRSE |
| | | DTAVYYCARDRSSAIGYCSSISCYKGSFDIWGQGTMVTVSSASTKG |
| 135 | 8ANC75HC | QVQLQESGPGLVKPSETLSLTCTVSGGSISSRSYYWGWIRQPPG |
| | | KGLEWVGSIYYTGSTYYSPSLKSRVTISVDTSQNQFSLKLNSVTAA |
| | | DTAVYYCARQKGSGTSLLYWGQGTLVTVSSASTKG |
| 136 | 8ANC76HC | QVQLVQSGSELKKPGASVKVSCKASGYTFTSYAINWVRQAPGQG |
| | | LEWMGWINTNTGNPTYAQGFTGRFVFSLETSVSTAYLQINSLKAE |
| | | DTAVYYCARDLLESRTYYNDIRDCWGQGTLVTVSSASTKG |
| 137 | 8ANC78HC | QVQLQESGSGLVKPSGTLSLTCAVSNGPISSGNWWSWVRQTPEK |
| | | GLEWIGEVYHSGSTNHNPSLKSRATILVDKSKNQFSLNLRSVTAAD |
| | | TAVYYCARVRGSWNFDYWGQGILVTVSSASTKG |
| 138 | 8ANC79HC | QHQLVPCVAEVRKPGASVKVSCKVSGYTLTEISMHWVRQAPGKG |
| | | LEWMGGFDREDGETIYAQKFQGRVTMTEDTSTDTAYMELSSLRS |
| | | EDTAVYYCATTYLAVVPDGFDGYSSSWYWFDPWGQGTLVTVSSA |
| | | SMQGPMLLSPTGTLLPRAPLVQTRPGP |
| 139 | 8ANC7HC | QVQLVQSGAEVRKPGSSLKVSCKSSGGTFSRYVVNWVRQAPGQ |
| | | GLEWMGGIIPIFGIAKYAQKFQDRVTMTADESKNTVYLDFSSLRSD |
| | | DTAVYYCARDRGDTRLLDYGDYEDERYYYGMDVWGQGTTVIVSS |
| | | ASTKG |
| 140 | 8ANC80HC | QVQLVQSGAEVKKPGSSVKVSCKASGGTFSTYAFSWVRQAPGQ |
| | | GLEWMGGIIPIFGTENYAQKFQGRVTITADKSTSTAYMELSSLRSE |
| | | DTAVYYCARDRSSAIGYCSSISCYKGSFDIWGQGTMVTVSSASTKG |
| 141 | 8ANC82HC | QVHLEESGPGLVKTSQTLSLTCSVSSYSISRSGYFWTWIRQRPGK |
| | | GLEWIGYIYFNGRTTYNPSLKSRITISRDTSHSQFSLTLNSLSAADT |
| | | AVYYCGRCQDGLASRPIDFWGQGTLVTVSSASTKG |
| 142 | 8ANC83HC | QVQLVESGGGVVQPGKSLRLSCAISGFLFNNYGGQWVRQAPGK |
| | | GLEWVAAISYDGNNRYYADSAKGRFLISRDTPKNILYLQIYSLRLDD |
| | | TAVYYCARDSVSKSYSAPPEFWGQGTVVTVSSASTKG |
| 143 | 8ANC91HC | QLQLQESGPGLVKPSETLSLTCSVSDGSINSNSYYWAWIRQSPGK |
| | | GLEWIGSVYYFGGTYYSPSLKSRVTMSVDRSKNQFSLNVSSVTAA |
| | | DTAIYYCARHVRPYDRSGYPERPNWFDPWGRGTLVTVSSASTKG |
| 144 | 8ANC92HC | RVQLVQSGAEVKKPGSSVTVSCKASGGSFSSYAISWVRQAPGQG |
| | | LEWVGGVKVMFGTVHYSQKVQGRVTITADDSTGTSYLELSGLRS |
| | | ADTAVYYCARNAGAYFYPFDIWGQGTLIIVSSASTKG |
| 145 | 8ANC93HC | QVQLVQSGAEVKKPGASVKVSCKASGYTFTRYHIHWVRHAPGQG |
| | | LEWMGKINPSRASTKYAKKFQDRVTMTRDTSTSTVYMELSSLRG |
| | | DDTAVYYCGREMGTFTLLGVVIDHYDFYPMDVWGQGTPVTVSSA |
| | | STKG |
| 146 | 8ANC9HC | QVQLVQSGAEVRKPGSSLKVSCKSSGGTFSRYVVNWVRQAPGQ |
| | | GLEWMGGIIPIFGIAKYAQKFQDRVTMTADESKNTVYLDFSSLRSG |
| | | DTAVYYCARDRGDTRLLDYGDYEDERYYYGMDVWGQGTTVTVS |
| | | SASTKG |
| 147 | 12A10HC | SQHLVQSGTQVKKPGASVRVSCQASGYTFTNYILHWWRQAPGQ |
| | | GLEWMGLIKPVFGAVNYARQFQGRIQLTRDIYREIAFLDLSGLRSD |
| | | DTAVYYCARDESGDDLKWHLHPWGQGTQVIVSPASTKG |
| 148 | 12A12HC | SQQLVQSGTQVKKPGASVRISCQASGYSFTDYVLHWWRQAPGQ |
| | | GLEWMGWIKPVYGARNYARRFQGRINFDRDIYREIAFMDLSGLRS |
| | | DDTALYFCARDGSGDDTSWHLDPWGQGTLVIVSAASTKG |
| 149 | 12A13HC | SQQLVQSGTQVKKPGASVRISCQASGYSFTDYVLHWYRQAPGQ |
| | | GLEWMGWIKPVYGARNYARRFQGRINFDRDIYREIAFMDLSGLRS |
| | | DDTALYFCARDGSGDDTSWYLDPWGQGTLVIVSAASTKG |
| 150 | 12A16HC | SQQLVQSGTQVKKPGASVRISCQASGYTFTDYVLHWWRQAPGQ |
| | | GLEWMGWIKPVYGARNYARRFQGRINFDRDIYREIAYMDLSGLRS |
| | | DDTARYFCARDGSGDDTSWHLHPWGQGTLVIVSAASTKG |
| 151 | 12A17HC | SQQLVQSGTQVKKPGASVRVSCQASGYTFMNYIIHWWRQAPGQ |
| | | RLEWMGWINPVFGARNYAHRFQGRINFDRDINRETFQMELTGLR |
| | | SDDTAVYYCARDGSGDARDWHLDPWGQGTLVIVSSASTKG |
| 152 | 12A1HC | SQHLVQSGTQVKKPGASVRVSCQASGYTFTNYILHWWRQAPGQ |
| | | GLEWMGLIKPVFGAVNYARQFQGRIQLTRDINREIAFLDLSGLRSD |
| | | DTAVYYCARDESGDDLKWHLHPWGQGTQVIVSPASTKG |
| 153 | 12A20HC | SQQLVQSGTQVKKPGASVRVSCQASGYTFMNYIIHWWRQAPGQ |
| | | RLEWMGWINPVFGARNYAHRFQGRINFDRDINRETFQMDLTGLR |
| | | SDDTAVYYCARDGSGDARDWHLHPWGQGTLVIVSSASTKG |
| 154 | 12A21HC | SQHLVQSGTQVKKPGASVRVSCQASGYTFTNYILHWWRQAPGQ |
| | | GLEWMGLIKPVFGAVNYARQFQGRIQLTRDIYREIAFLDLSGLRSD |
| | | DTAVYYCARDESGDDLKWHLHPWGQGTQVIVSPASTKG |
| 155 | 12A22HC | SQQLVQSGTQVKKTGASVRVSCQASGYDFTKYLIHWWRQAPGQ |
| | | GLEWMGWMKPVYGATNYAHRFQGRISFTRDIYREIAFMDLNGLR |
| | | SDDTAVYFCARDGGGDDRTWLLDAWGQGTLVIVSSASTKG |
| 156 | 12A23HC | SQHLVQSGTQVKKPGASVRVSCQASGYTFTNYILHWWRQAPGQ |
| | | GLEWMGLIKPVFGAVNYARQFQGRIQLTRDINREIAFLDLSGLRSD |
| | | DTAVYYCARDESGDDLKWHLHPWGQGTQVIVSPASTKG |
| 157 | 12A27HC | SQQLVQSGTQVKKPGASVRISCQASGYTFTDYVLHWWRQAPGQ |
| | | GLEWMGWIKPVYGARNYARRFQGRINFDRDIYREIAFLDLSGLRS |
| | | DDTARYFCARDGSGDDTSWHLHPWGQGTLVIVSAASTKG |
| 158 | 12A2HC | SQQLVQSGTQVKKPGASVRISCQASGYTFTDYVLHWWRQAPGQ |
| | | GLEWMGWIKPVYGARNYARRFQGRINFDRDIYREIAYMDLSGLRS |
| | | DDTARYFCARDGSGDDTSWHLHPWGQGTLVIVSAASTKG |
| 159 | 12A30HC | SQQLVQSGTQVKKPGASVRISCQASGYTFTDYVLHWWRQAPGQ |
| | | GLEWMGWIKPVYGARNYARRFQGRINFDRDIYREIAYMDLSGLRS |
| | | DDTARYFCARDGSGDDTSWHLHPWGQGTLVIVSAASTKG |
| 160 | 12A37HC | SQQLVQSGTQVKKTGASVRVSCQASGYDFTKYLIHWWRQAPGQ |
| | | GLEWMGWMKPVYGATNYAHRFQGRISFTRDIYREIAFMDLNGLR |
| | | SDDTAVYFCARDGGGDDRTWLLDAWGQGTLVIVSSASTKG |
| 161 | 12A46HC | SQQLVQSGAQVKKPGASVRVSCQASGYTFTNHFLHWWRQAPRQ |
| | | GLEWMGWINPVHGGRNYARRFQGRINFGRDVYQETAYMELSGL |
| | | RNDDTATYFCARGGGDGRNWHLHPWGQGTLVIVSAASTKG |
| 162 | 12A4HC | SQHLVQSGTQVKKPGASVRVSCQASGYTFTNYILHWWRQAPGQ |
| | | GLEWMGLIKPVFGAVNYARQFQGRIQLTRDIYREIAFLDLSGLRSD |
| | | DTAVYYCARDESGDDLKWHLHPWGQGTQVIVSPASTKG |
| 163 | 12A55HC | SQQLVQSGAQVKKPGASLRVSCQASGYTFMNYLLHWWRQAPGQ |
| | | GLEWMGWINPVYGAVNYAHRFQGRLTFSRDVYREIAYMDLNGLR |
| | | SDDTAVYFCARDGSGDDRNWHLDPWGQGTLVIVSSASTKG |
| 164 | 12A56HC | SQQLVQSGTQVKKPGASVRVSCQASGYTFTNYILHWWRQAPGR |
| | | GLEWMGLIKPVYGAVNYARQFQGRIQLTRDIYREIAFLDLSGLRPD |
| | | DTAVYYCARDESGYDLNWHLDSWGQGTQVIVSPASTKG |
| 165 | 12A6HC | SQQLVQSGTQVKKPGASVRVSCQASGYTFTDYVLHWWRQAPGQ |
| | | GLEWMGWIKPVYGARNYAHRFQGRINFDRDVYREIAYMDLSGLR |
| | | SDDTAVYFCARDGSGDATSWHLHPWGQGTLVIVSSASTKG |
| 166 | 12A7HC | SQQLVQSGTQVKKPGASVRVSCQASGYTFMNYIIHWWRQAPGQ |
| | | RLEWMGWINPVFGARNYAHRFQGRINFDRDINRETFQMELTGLR |
| | | SDDTAVYYCARDGSGDARDWHLDPWGQGTLVIVSSASTKG |
| 167 | 12A9HC | QVTLVQSGAEVKKPGASVRISCRASGFTFDDYSDYSFIPTTYLIHW |
| | | FRQAPGQGLEWMAWINSVNGGRNIARQFQGRVTVARDRSNSIAF |
| | | LEFSGLRHDDTAVYFCARDRRDDDRAWLLDPWGQGTRVTVSSA |
| | | STKG |
| 168 | LSSB2339HC | QVRLEQSGAAMRKPGASVTLSCQASGYNFVKYIVHWVRQKPGLG |
| | | FEWVGMIDPYRGRPWSAHKFQGRLSLSRDTSMEILYMTLTSLTSD |
| | | DTATYFCARAEAASDSHSRPIMFDHWGQGSRVTVSSASTKG |
| 169 | LSSB2351HC | QVRLEQSGTAVRKPGASVTISCQASGYNFVKFFIHWVRQRPGQG |
| | | FEWVGMIEPFRGRPWSAGNFQGRLSLSRDVSTETLYMTLNNLRS |
| | | DDTAVYFCARLEAESDSHSRPIMFDHWGHGSLVTVSSASTKG |
| 170 | LSSB2361HC | QVRLFQSGAAMRKPGASVTISCEASGYNFMNYFVHWVRQRPGR |
| | | GFEWLGMINPRGGRPWSAQSVQGRLTLTRDTSTEMFYMRLDGL |
| | | RSDDTATYFCARNEADYHDGNGHSLRGMFDYWGQGSLITVSSAS |
| | | TKG |
| 171 | LSSB2364HC | QVRLEQSGAAVRKPGASVTLSCQASGYNFVNYIIHWVRQRPGLDF |
| | | EWVGMIDPYRGRPWSAHKFQGRLSLSRDVSTEILYMTLSSLRSDD |
| | | TATYFCARAEAESQSHSRPIMFDFWGQGSRVTVSSASTKG |
| 172 | LSSB2367HC | QVRLSQSGAAIKKPGASVTISCETEGYTFINYIIHWVRQPPGRGFE |
| | | WLGMIDPRNGRPWFGQSVQGRLSLRRDTYTEVVYMTLSGLTSDD |
| | | AGHYFCARNEPQYHDGNGHSLPGMFDYWGQGTLVAVSSASTKG |
| 173 | LSSB2416HC | QVRLSQSGAAVKKPGASVTIVCETEGYNFIDYIIHWVRQPPGRGFE |
| | | WLGMIDPRNGRPWSGQKVHGRLSLWRDTSTEKVYMTLTGLTSD |
| | | DTGLYFCGRNEPQYHDDNGHSLPGMIDYWGQGTMVTVSSASTKG |
| 174 | LSSB2434HC | QVRLFQSGAAMRKPGASVTISCEASGYNFMNYFVHWVRQRPGR |
| | | GFEWLGMINPRGGRPWSAQSVQGRLTLTRDTSTEMFYMRLDGL |
| | | RSDDTATYFCARNEADYHDGNGHSLRGMFDYWGQGSLITVSSAS |
| | | TKG |
| 175 | LSSB2483HC | QVRLFQSGAAMRKPGASVTISCEASGYNFMNYFVHWVRQRPGR |
| | | GFEWLGMINPRGGRPWSAQSVQGRLTLTRDTSTEMFYMRLDGL |
| | | RSDDTATYFCARNEADYHDGNGHSLRGMFDYWGQGSLITVSSAS |
| | | TKG |
| 176 | LSSB2490HC | QVRLFQSGAAMRKPGASVTISCEASGYNFMNYFVHWVRQRPGR |
| | | GFEWLGMINPRGGRPWSAQSVQGRLTLTRDTSTEMFYMRLDGL |
| | | RSDDTATYFCARNEADYHDGNGHSLRGMFDYWGQGSLITVSSAS |
| | | TKG |
| 177 | LSSB2503HC | QVRLEQSGAAVRKPGASVTLSCQASGYNFVRYIIHWVRQRPGLDF |
| | | EWVGMIDPYRGRPWSAHKFGGRLSLTRDVSTEILYMTLTSLRSDD |
| | | TATYFCARAEAESQSHSRPIMFDSWGQGSRVTVSSASTKG |
| 178 | LSSB2525HC | QVRLEQSGNAVRKPGASVTISCQASGYNFVKFFIHWVRQRPGQG |
| | | FEWVGMIEPFRGRPWSAGNFQGRLSLSRDVSTETLYMTLNNLRS |
| | | DDTAVYFCARLEAESDSHSRPIMFDHWGHGSLVTVSSASTKG |
| 179 | LSSB2530HC | QVRLEQSGAAMRKPGASVTLSCQASGYNFVKYIIHWVRQKPGLG |
| | | FEWVGMIDPYRGRPWSAHKFQGRLSLSRDTSMEILYMTLTSLKSD |
| | | DTATYFCARAEAASDSHSRPIMFDHWGQGSRVTVSSASTKG |
| 180 | LSSB2538HC | QVRLFQSGAAMRKPGASVTISCEASGYNFLNYFVHWVRQRPGRG |
| | | FEWLGMINPRGGRPWSAQSVQGRLTLTRDTSTEMFYMRLDGLRS |
| | | DDTATYFCARNEADYHDGNGHSLRGMFDYWGQGSLITVSSASTKG |
| 181 | LSSB2554HC | QVRLEQSGAAMRKPGASVTLSCQASGYNFVKYIIHWVRQKPGLG |
| | | FEWVGMIDPYRGRPWSAHKFQGRLSLSRDTSMEILYMTLTSLKSD |
| | | DTATYFCARAEAASDSHSRPIMFDHWGQGSRVTVSSASTKG |
| 182 | LSSB2573HC | QVRLSQSGAAIKKPGASVTISCETEGYTFINYIIHWVRQPPGRGFE |
| | | WLGMIDPRNGRPWFGQSVQGRLSLRRDTYTEVVYMTLSGLTSDD |
| | | TGLYFCARNEPQYHDGNGHSLPGMFDSWGQGTLVAVSSASTKG |
| 183 | LSSB2578HC | QVQLFQSGAAMRKPGASVTISCEASGYNFMNYFVHWVRQRPGR |
| | | GFEWLGMINPRGGRPWSAQSVQGRLTLTRDTSTEMFYMRLDGL |
| | | RSDDTATYFCARNEADYHDGNGHSLRGMFDYWGQGSLITVSSAS |
| | | TKG |
| 184 | LSSB2586HC | QVRLEQSGAAMRKPGASVTLSCQASGYNFVKYIVHWVRQKPGLG |
| | | FEWVGMIDPYRGRPWSAHKFQGRLSLSRDTSMEILYMTLTSLKSD |
| | | DTATYFCARAEAASDSHSRPIMFDHWGQGSRVTVSSASTKG |
| 185 | LSSB2609HC | QVRLFQSGAAMKKPGASVTISCEASGYNFMNYFVHWVRQRPGR |
| | | GFEWLGMINPRGGRPWSAQSVQGRLTLTRDISTEMFYMRLDGLR |
| | | SDDTATYFCARNEADYHDGNGHSLRGMFDYWGQGSLITVSSAST |
| | | KG |
| 186 | LSSB2612HC | QVRLEQSGTAMRKPGASVTLSCQASGYNFVKYIVHWVRQKPGLG |
| | | FEWVGMIDPYRGRPWSAHKFQGRLSLSRDTSMEILYMTLTSLKSD |
| | | DTATYFCARAEAASDSHSRPIMFDHWGQGSRVTVSSASTKG |
| 187 | LSSB2630HC | QVRLFQSGAAMRKPGASVTISCEASGYNFMNYFVHWVRQRPGR |
| | | GFEWLGMINPRGGRPWSAQSVQGRLTLTRDTSTEMFYMRLDGL |
| | | RSDDTATYFCARNEADYHDGNGHSLRGMFDYWGQGSLITVSSAS |
| | | TKG |
| 188 | LSSB2640HC | QVRLFQSGAAMRKPGASVTISCEASGYNFMNYFVHWVRQRPGR |
| | | GFEWLGMINPRGGRPWSAQSVQGRLTLTRDTSTEMFYMRLDGL |
| | | RSDDTATYFCARNEADYHDGNGHSLRGMFDYWGQGSLITVSSAS |
| | | TKG |
| 189 | LSSB2644HC | QVRLSQSGAAIKKPGASVTISCETEGYTFINYIIHWVRQPPGRGFE |
| | | WLGMIDPRNGRPWFGQSVQGRLSLRRDTYTEVVYMTLSGLTSDD |
| | | TGLYFCARNEPQYHDGNGHSLPGMFDSWGQGTLVAVSSASTKG |
| 190 | LSSB2665HC | QVRLFQSGAAMRKPGASVTISCEASGYNFMNYFVHWVRQRPGR |
| | | GFEWLGMINPRGGRPWSAQSVQGRLTLTRDTSTEMFYMRLDGL |
| | | RSDDTATYFCARNEADYHDGNGHSLRGMFDYWGQGSLITVSSAS |
| | | TKG |
| 191 | LSSB2666HC | QVRLEQSGAAMRKPGASVTLSCQASGYNFVKYIIHWVRQKPGLG |
| | | FEWVGMIDPYRGRPWSAHKFQGRLSLSRDTSMEILYMTLTSLKSD |
| | | DTATYFCARAEAASDSHSRPIMFDHWGQGSRVTVSSASTKG |
| 192 | LSSB2669HC | QVRLEQSGAAMRKPGASVTLSCQASGYNFVKYIIHWVRQKPGLG |
| | | FEWVGMIDPYRGRPWSAHKFQGRLSLSRDTSMEILYMTLTSLKSD |
| | | DTATYFCARAEAASDSHSRPIMFDHWGQGSRVTVSSASTKG |
| 193 | LSSB2680HC | QVRLEQSGVAMRKPGASVTLSCQASGYNFVKYIIHWVRQKPGLG |
| | | FEWVGMIDPYRGRPWSAHKFQGRLSLSRDTSMEILYMTLTSLKSD |
| | | DTATYFCARAEAASDIHSRPIILTGPGEYGLDLEHMDWTWRILCLL |
| | | AVAPGCHSQ |
| 194 | LSSB2683HC | QVRLEQSGAAMRKPGASVTLSCQASGYNFVKYIVHWVRQKPGLG |
| | | FEWVGMIDPYRGRPWSAHKFQGRLSLSRDTSMEILYMTLTSLKSD |
| | | DTATYFCARAEAASDSHSRPIMFDHWGQGSRVTVSSASTKG |
| 195 | LSSB344HC | QVRLEQSGTAVRKPGASVTISCQASGYNFVKFFIHGVRQRPGQGF |
| | | EWVGMIEPFRGRPWSAGNFQGRLSLSRDVSTETLYMTLNNLRSD |
| | | DTAVYFCARLEAESDSHSRPIMFDHWGHGSLVTVSSASTKG |
| 196 | LSSNEC107HC | QVRLVQSGPQVKTAGASMRVSCEASGYRFLDYIIVWIRQTHGQHF |
| | | EYVGMINPRGGTPWPSSKFRDRLTLTRDIYTDTFYLGLNNLGSGD |
| | | TAIYFCARLEADGDDYSPKMFDYWGQGTRIIVSAASTKG |
| 197 | LSSNEC108HC | QVHTFQSGSSMKKSGASVTISCEATGYNIKNYILHWVRQKPGRGF |
| | | EWVGMIDPINGRPWFGQPFRGRLTLTRDLSTETFYMSLSGLTSDD |
| | | TATYFCARREADYHDGNGHTLPGMFDFWGPGTLITVSSASTKG |
| 198 | LSSNEC109HC | QVSLVQSGPQVKTPGASMRVSCETSGYRFLDYIIVWIRQTHGQHF |
| | | EYVGMINPRGGTPWPSSKFRDRLTMTRDIHTDTFYLGLNNLRSDD |
| | | TAIYFCARLEADGDDYSPKMFDYWGQGTRIIVSAASTKG |
| 199 | LSSNEC110HC | QVRLVQSGPQMKTPGASLRLSCEVSGYRFLDYFIVWVRQTGGQG |
| | | FEYVGMINPRGGRPWSSWKFRDRLSLTRDIETDTFYLGLNNLRSD |
| | | DTAIYFCARLEADGDNYSPKMVDYWGQGTKIIVSPASTKG |
| 200 | LSSNEC116HC | QVRLSQSGAAVVKTGASVTISCETEGYNFVNYIIHWVRRPPGRGF |
| | | EWLGMIDPRNGHPWFAQTVRGRLSLRRDTFKETVYMTLSGLTSD |
| | | DTGVYFCARNEPQYHSLPGMFDYWGHGTPVTVSSASTKG |
| 201 | LSSNEC117HC | QVRLVQSGAQLKKPGASVTVSCEASGYNFVNYIINWVRQTPGRG |
| | | FEWVGMIDPRRGRPWSAQKFQGRLTLTRDIDSEKLYMHLSGLRG |
| | | DDTAVYYCARQDSDFHDGHGHTLRGMFDSWGQGSPVTVSSAST |
| | | KG |
| 202 | LSSNEC118HC | QVRLVQSGPQVKTPGASMRISCEASGYRFQDYIIVWIRQTHGQGF |
| | | EYVGMINPRGGTPWSSSKFRDRLSLTRDIYTDTFYLGLNNLGSDD |
| | | TAIYFCARLEADGGDYSPKMFDYWGQGTRIIVSAASTKG |
| 203 | LSSNEC11HC | QVRLFQSGAAMRKPGASVTISCEASGYNFMNYFVHWVRQRPGR |
| | | GFEWLGMINPRGGRPWSAQSVQGRLTLTRDTSTEMFYMRLDGL |
| | | RSDDTATYFCARNEADYHDGNGHSLRGMFDYWGQGSLITVSSAS |
| | | TKG |
| 204 | LSSNEC122HC | QVRLVQSGPQVKRPGASIRLSCETSGYRFQDYIVAWIRQTRGQRF |
| | | EFVGMVNPRGGRPWPSSKFRDRVTLTRDIESETFHLGLNDLTSDD |
| | | TATYFCARLEADGADYSPKMFDFWGQGTKIWSPASTKG |
| 205 | LSSNEC123HC | QVRLEQSGAAVRKPGASVTLSCQASGYNFVNYIIHWVRQRPGLDF |
| | | EWVGMIDPYRGRPWSAHKFEGRLSLSRDVSTEVLYMTLSSLRSD |
| | | DTATYFCARAEAESQSHSRPIMFDYWGQGSRVTVSSASTKG |
| 206 | LSSNEC127HC | QVRLEQSGAAMRKPGASVTLSCQASGYNFVKYIIHWVRQKPGLG |
| | | FEWVGMIDPYRGRPWSAHKFQGRLSLSRDTSMEILYMTLTSLKSD |
| | | DTATYFCARAEAASDSHSRPIMFDHWGQGSRVTVSSASTKG |
| 207 | LSSNEC18HC | QVRLSQSGAAVMKTGASVTISCETEGFNFVNYIIHWVRRPPGRGF |
| | | EWLGMIDPRNGHPWFAQTVRGRLSLRRDTFNEIVYMTLSGLTTDD |
| | | TGLYFCARNEPQYHSLPGMFDYWGQGTPVTVSSASTKG |
| 208 | LSSNEC24HC | QVRLSQSGAAMKKPGASVTISCETEGYTFINYIIHWVRQPPGRGFE |
| | | WLGMIDPRNGRPWFGQSVQGRLSLRRDTYTEVVYMTLSGLTSDD |
| | | AGLYFCARNEPQYHDGNGHSLPGMFDYWGQGTLVAVSSASTKG |
| 209 | LSSNEC29HC | QVRLSQSGAAVVKTGASVTISCETEGYTFVNYIIHWVRQSPGRGF |
| | | EWLGMIDPRNGHPWFGQRLRGRLSLRRDRSTETVFMTLSGLTSD |
| | | DTAIYFCARNEPQYYDGSGHSLPGMFDYWGQGTRVVVSSASTKG |
| 210 | LSSNEC2HC | QVRLFQSGAAMRKPGASVTISCEASGYNFMNYFVHWVRQRPGR |
| | | GFEWLGMINPRGGRPWSAQSVQGRLTLTRDTSTEMFYMRLDGL |
| | | RSDDTATYFCARNEADYHDGNGHSLRGMFDYWGQGSLITVSSAS |
| | | TKG |
| 211 | LSSNEC33HC | QVRLVQSGPQVKTPGASIRLSCEASGYRFLDYFIVWVRQTPGQGF |
| | | EYVGMINPRGGRPWSSWKFRDRLSLTREIDTDTFYLGLSNLRSDD |
| | | TAIYFCARLEADGDDYSPKMVDYWGQGTKIIVSAASTKG |
| 212 | LSSNEC34HC | QVRLFQSGAAMRKPGASVTISCEASGYNFMNYFVHWVRQRPGR |
| | | GFEWLGMINPRGGRPWSAQSVQGRLTLTRDTSTEMFYMRLDGL |
| | | RSDDTATYFCARNEADYHDGNGHSLRGMFDYWGQGSLITVSSAS |
| | | TKG |
| 213 | LSSNEC3HC | QVRLEQSGAAVRTPGASVTLSCQASGYKFVNYIIHWVRQRPGLAF |
| | | EWVGMIDPYRGRPWSAHSFEGRLSLSRDVSMEILYMTLTSLRSD |
| | | DTATYFCARAEAESQSHSRPIISTSGAR |
| 214 | LSSNEC46HC | QVQFFQSGSSMKKSGASVTISCEATGYNIKNHILHWVRQKPGRGF |
| | | EWVGMIDPINGRPWFGQAFRGRLTLTRDLSTETFYMSLSGLTSDD |
| | | TATYFCARREADYHDGNGHTLPGMFDFWGPGTLVTVSSASTKG |
| 215 | LSSNEC48HC | QVRLSQSGAAVVKTGASVTISCETEGYTFVNHIIHWVRQPPGRGF |
| | | EWLGMIDPRNGHPWFGQRLRGRLSLRRDRSTETVFMTLSGLTSD |
| | | DIGIYFCARNEPQYFDGSGHSLPGMFDYWGQGTRVWSSASTKG |
| 216 | LSSNEC52HC | QVRLSQSGAAVVKTGASVTISCETEGYTFVNYIIHWVRQPPGRGF |
| | | EWLGMIDPRNGHPWFGQRLQGRLSLRRDRSTETVFMTLSGLTSD |
| | | DTGIYFCARNEPQYYDGSGHSLPGMFDYWGQGTRVVVSSASTKG |
| 217 | LSSNEC56HC | QVRLVQSGPQVKTPGASMRVSCEASGYRFLDYIIVWIRQTHGQHF |
| | | EYVGMINPRGGTPWPSSKFRDRLSLTRDIHTDTFYLGLNNLGSDD |
| | | TAIYFCARLEADGDDYSPKMFDHWGQGTRIIVSAASTKG |
| 218 | LSSNEC60HC | QVRLEQSGAAVKKPGASVTISCQASGYNFVKFFIHWVRQRPGQG |
| | | FEWVGMIEPYRGRPWSAGNFQGRLSLSRDVSTETLYMTLNNLRS |
| | | DDTAVYFCARLEAESDSHSRPIMFDHWGHGSLVTVSSASTKG |
| 219 | LSSNEC66HC | QVRLSQSGAAVMKTGASVTISCETEGYNFVNYIIHWVRRPPGRGF |
| | | EWLGMIDPKNGHPWFAQAVRGRLSLRRDTFNEVVYMTLSGLTSD |
| | | DTGLYFCARNEPQYHDGNGHSLPGMFDFWGQGTLVTVSSASTKG |
| 220 | LSSNEC70HC | QVRLSQSGAAVVKTGASVTISCETEGYTFVNYIIHWVRQPPGRGF |
| | | EWLGMIDPRNGHPWFGQRFRGRLSLRRDRSTETVFMTLSGLTSD |
| | | DNGIYFCARNEPQYYDGSGHSLPGMFDYWGQGTRVVVSSASTKG |
| 221 | LSSNEC72HC | QVRLEQSGAAVRKPGASVTLSCQASGYNFVNYIIHWVRQRPGLDF |
| | | EWVGMIDPYRGRPWSAHKFQGRLSLSRDVSTEILYMTLSSLRSDD |
| | | TATYFCARAEAESQSHSRPIMFDFWGQGSRVTVSSASTKG |
| 222 | LSSNEC7HC | QVRLEQSGAAVRKPGASVTLSCQASGYNFVNYIIHWVRQRPGLDF |
| | | EWVGMIDPYRGRPWSAHKFQGRLSLSRDVSTEILYMTLNSLRSD |
| | | DTATYFCARAEAESQSHSRPIMFDSWGQGSRVTVSSASTKG |
| 223 | LSSNEC82HC | QVRLFQSGAAMRKPGASVTISCEASGYNFMNYFVHWVRQRPGR |
| | | GFEWLGMINPRGGRPWSAQSVQGRLTLTRDTSTEMFYMRLDGL |
| | | RSDDTATYFCARNEADYHDGNGHSLRGMFDYWGQGSLITVSSAS |
| | | TKG |
| 224 | LSSNEC89HC | QVRLEQSGGALRKPGASVTLSCQASGYNFVKYIIHWVRQRPGLGF |
| | | EWVGMIDPYRGRPWYAHSFAGRLSLSRDTSTETLYMTLSSLKSD |
| | | DTATYFCARAEAASDSHSRPIMDWTWRILCLLAVVPASTKG |
| 225 | LSSNEC8HC | QVRLFQSGAAMRKPGASVTISCEASGYNFMNYFVHWVRQRPGR |
| | | GFEWLGMINPRGGRPWSAQSVQGRLTLTRDTSTEMFYMRLDGL |
| | | RSDDTATYFCARNEADYHDGNGHSLRGMFDYWGQGSLITVSSAS |
| | | TKG |
| 226 | LSSNEC94HC | QVRLEQSGAAMRKPGASVTLSCQASGYNFVKYIVHWVRQKPGLG |
| | | FEWVGMIDPYRGRPWSAHKFQGRLSLSRDTSMEILYMTLTSLKSD |
| | | DTATYFCARAEAASDSHSRPIMFDHWGQGSRVTVSSASTKG |
| 227 | LSSNEC95HC | QVRLVQSGPQVKRPGASIRLSCESSGYRFQDYIVAWIRQTRGQGF |
| | | EFVGMVNPRGGRPWPSSRFRDRVTLTRDIESETFYLGLNDLTSDD |
| | | TATYFCARLEADGSDYSPKMFDFWGQGTKIVVSPASTKG |
| 228 | LSSNEC9HC | QVRLVQSGAQLKKPGASVTVSCEASGYNFVNYIINWVRQTPGRSF |
| | | EWVGMIDPRRGRPWSAQKFQGRLTLTRDIDSEKLYMHLSGLRGD |
| | | DTAVYYCARQDSDFHDGHGHTLRGMFDSWGQGSPVTVSSASTKG |
| 229 | LSSB2055HC | QVQLVQSGPELMKPGSSVKVSCRASGDNFLTSTFNWLRQAPGQ |
| | | RLEWMGRFIPSLGLITSAPKFSDRLTITADQATLTAYMELTGLTSED |
| | | TALYYCARGLCRGGNCRLGPSGWLDPWGRGTQVTVSSASTKG |
| 230 | LSSB2066HC | QVVLIQSGAEVKRPGSSVKVSCKASGGSFPITWVRQAPGHGLEW |
| | | MGGINPFFGTTNYAQKFQGRVSITADESTSTTYLHLSDLRSEDTAV |
| | | YFCARENREKWLVLRSWFAPWGQGTLVTVSSASTKG |
| 231 | LSSB2068HC | EESGPGLVKPSQTLSLTCSVSGDSVSSGGYFWSWIRQHPTKGLE |
| | | CLGYVYYTGNTYYNPSLKSPPTIEVAMANNQVSLKLGSVTAADTA |
| | | VYYCARIKRFRGGNYFDTWGHGLLVTVSSASTKG |
| 232 | LSSB2080HC | LAQLEQSGGGVVKPGGSLRLPCAASGFTFIDYYMAWIRLAPGKGL |
| | | EWLSYISKNGDYTKYSESLKGRFTISRDNAKNLVILQLNRLRADDT |
| | | AIYFCARADGLTYFGELLQYIFDLWGQGARVIVSSASTKGPSVFPL |
| | | APSSKSTSGHASV |
| 233 | LSSB2133HC | QVQLVQSGAEVKKPGASVKISCKASGYSFRNYAVHWVRQAPGQ |
| | | GLEWMGEINGGNGNTEYSQKSQGRLTITRDISATTAYMELSSLRS |
| | | DDTAVYYCARVAYVHVVTTRSLDNWGQGTLVTVSSASTKG |
| 234 | LSSB2182HC | QVQIRQSGPGLVKPLETLSLSCIVFGGSFIAYHWTWIRQAPLKGLE |
| | | WIGDIDQGGDITYSPSLKSRVTMSVDRSKSQFSLKLSSVTAADAAV |
| | | YYCVRGPPNRYAVTSFTSGTHRERSSYYFDYWGPGTLVTVSSAS |
| | | TKG |
| 235 | LSSB218HC | KAPATLSLSPGERATLSCRASQSVGSDLAWYQQKPGQAPRLLIYD |
| | | ASNRATAIPARFSGSGSGTDFTLSISSLEPEDFAVYFCQQRYDKIT |
| | | FGQGTRLEIQRTVAAPSVFIFPPSDEQ |
| 236 | LSSB2277HC | FVQLVESGGGVVQPGTSLRLSCTTSGFIFSDYGMHWVRQAAGKG |
| | | LEWVAVIWHDGSNRFYADSVKGRFTISRDNSKNAVYLEMNNLRVE |
| | | DTALYYCARTSMDIDYWGQGTPVTVSSASTKG |
| 237 | LSSB2288HC | QVYLVQSGPELKKPGASVKISCKASGYNFPKYAIHWVRQAPGQGL |
| | | QWMGWINGDNGDARYSQKLQGRVTPSTDTSASVVYMELKRLRS |
| | | EDTAVYYCARALYPWEIGGVPSTMGDDYWGQGTLITVSSASTKG |
| 238 | LSSB331HC | QVHLQQWGAGLLKPSETLSLTCAVSGGSFSGFFWTWIRQSPGKG |
| | | LEWIGEVNHSGFTHSNPSLESRATISVAASNTQFSLRLASVTAADT |
| | | AIYFCALRYFDWSPFRRDTYGTDVWGQGTTVIVSSASTKG |
| 239 | LSSNEC101HC | QVQLVQSGAELKKPGSSVKVSCKASGGTFNNHTFNWVRQAPGQ |
| | | GLEWMGRTIPILGSRDYAKTFQDRVTIIADKSTSTVYLELR |
| | | TGVYYCATSMYYFDSGGYYRNTDLDKWGQGSLVTVSSASTKG |
| 240 | LSSNEC106HC | GLDLEHDGHHKEEPRASVTVSCEASGYNFVNYIIHWVRLTPGRGF |
| | | EWMGMIDPRRGRPWSAQKFQGRLTLTRDIDSERLYMQLSGLRGD |
| | | DTAVYFCARQEPDFHDGHGHTLRGMFDSWGQGSPVSVSSASTKG |
| 241 | LSSNEC112HC | QVQLVQSGAELKKPGSSVKVSCKASGGTFSNYAINWVRQAPGQG |
| | | FEWMGGIIPLFATPTYAQKFQGRVRITADDSTSTAYMELSSLRSDD |
| | | TAVYFCARPNVVRSALDYWGQGTLVTVSSASTKG |
| 242 | LSSNEC115HC | QARLDQWGTGLLKPSETLSLKCAVFGVLFTDYNWTWVRQSPGKG |
| | | LEWIGHLDHRGGGNYNPSLESRVTISLDYSKAQFSLHLKSVTVADT |
| | | ALYYCAGAVKGFWFDEVYNWFGPWSQGTLVTVASASTKG |
| 243 | LSSNEC124HC | QVQLQESGPGLVKPSGTLSLTCAVSGASISSRNWWTWVRQPPGK |
| | | GLEWIGEIYESGATNYNPSLKSRVTISVDKSKNQFSLRLTSVTAAD |
| | | TAVYFCARLMTFGGLIGTLDYWGQGTLVTVLQPPPRAHRYHPRNL |
| | | LQEHLCARVMP |
| 244 | LSSNEC125HC | QVQLVQSGAEVKKPGSSVKVSCKASGGTFSTYAISWVRQAPGQG |
| | | LEWMGGIIPSFSMSNYAQDFQGRLTITADESTSSVYMELNSLRSE |
| | | DTAVYYCARDFPRFHRLVGNYDFWRGTLDRFSYMDLWGRGTAV |
| | | TVSSASTKG |
| 245 | LSSNEC126HC | QVHLVQSGAEAKRPGSSVRVSCRASGGDFSSYTLSWVRQAPGQ |
| | | GIEWMGGVVPMLDTVHYAQKFQGRLTLSVDEGTSTAYMELSSLR |
| | | SEDTAMYYCTRGRQTFRAIWSGPPAVFDIWGQGTLVIVSSASTKG |
| 246 | LSSNEC14HC | NGGSLRLSCRVSGFGFHLYEMNWVRQAPGKGLEWISSISGSGES |
| | | THYSDSITGRFSMSRDEAKDSLYLQMNNLRVEDTAVYYCTRGFS |
| | | MGDGTGFSFDTWGRGTMVTVSSGLDTVSLASTKGPSVFPLAPCS |
| | | RSTSDARLS |
| 247 | LSSNEC16HC | AARLDQWGTGLVKPSETLSLKCAVFGVDFPDYTWTWARQAPGK |
| | | GLEWIGHRDHRGGSSYNPSLSGRATISLDTSKAQFSLHIKSVTVAD |
| | | TATYYCAGAVAGLWFEDAYNWFGPWSQGTLVTVAAASTKGPSVF |
| | | PLAPSSKSTSGHASVL |
| 248 | LSSNEC21HC | QARLDQWGTGLLKPSETLSLKCAVFGVLFTDYNWTWVRQSPGKG |
| | | LEWIGHLDHRGGGNYNPSLESRVTISLDYSKAQFSLHLKSVTVADT |
| | | ALYYCAGAVKGLWFDETYTWFGPWSQGTRVTVASASTKGPSVFP |
| | | LAPSSKSTSGTRDLS |
| 249 | LSSNEC30HC | QVQLVQSEAEVKKPGSSVKVSCKASGGTFRGYTISWVRQAPGQG |
| | | LEWMGRIIPILGKAIYAPSFQGRVTLTADKSTGTAYMELSRLRSDD |
| | | TAVYYCAKVKMRGSSGYYYLFDDWGQGTLVTVSSASTKG |
| 250 | LSSNEC49HC | QVHLVQSGAEVKKPGASVKVSCKVSGYTLSELSIHWVRQGPGRG |
| | | LEWMANFDPEDGETIYAPQFQGRVTLTEDTSTDTAYMQLTSLRSE |
| | | DTAVYYCATDRYTDTGRWGPGTLVTVSSASTKG |
| 251 | LSSNEC54HC | QARLDQWGTGLLKPSETLSLKCAVFGVLFTDYNWTWVRQSPGKG |
| | | LEWIGHLDHRGGGSYNPSLESRVSISLDYSKAQFSLHLKSVTVADT |
| | | ALYYCAGAVKGFWFDEPSTWFGPWSQGTMVTVASASTKG |
| 252 | LSSNEC55HC | QARLDQWGTGLLKPSETLSLKCAVFGVLFTDYNWTWVRQSPGKG |
| | | LEWIGHLDHRGGGNYNPSLESRVTISLDYSKAQFSLHLKSVTVADT |
| | | ALYYCAGAVKGFWFDEVYNWFGPGVREPWLPSPQPPPRAHRSS |
| | | PWHPPPRAPLVTATVP |
| 253 | LSSNEC57HC | QARLDQWGTGLLKPSETLSLKCAVFGVLFTDYNWTWVRQSPGKE |
| | | LEWIGHLDHRGGGNYNPSLESRVTISLDYSKAQFSLHLKSVTVADT |
| | | ARYYCAGAVKGFWFDDPYTWFGPWSQGTLVTVASASTKG |
| 254 | LSSNEC5HC | QVHLVQSGAEAKRPGSSVRVSCRASGGDFSSYTLSWVRQAPGQ |
| | | GLERMGGVVPMLDTVHYAQKFQGRLTLSVDEGTSTAYMELSSLR |
| | | SEDTAMYYCTRGRQTFRAIWSGPPVVFDIWGQGTLVSVSSASTKG |
| 255 | LSSNEC67HC | QFRLVQSGPEVKNPGSSVTVSCKASGGTFSGLGINWVRQAPGQG |
| | | LEWLGDIKTMYGTTNYAPKFQGRVTITADESTSTSYMELSGLRSE |
| | | DTAVFYCVRELFGHHPAFGVWGQGTSVIVSSASTKG |
| 256 | LSSNEC74HC | QVQLVQSGAEVKKPGASVKVSCKASGYTFTNYGVSWVRQAPGQ |
| | | GLEWMGWISPYSGNTNYAQRLQDRVTMTTDTSTNTAYMELRSLR |
| | | SDDTAVYYCAARSYYYYSMDVWGQGTTVTVSSASTKG |
| 257 | LSSNEC77HC | QVQLVQSGADVKKPGASVKVSCKVSGYTVSELSIHWVRQAPGKG |
| | | LEWMGGFDPEDGKTVSAQNFQGRVTMTEDKSTGTANMELRSLR |
| | | SEDTAVYYCATTVQLIVDFCNGGPCYNFDDWGQGTLVTVSSASTKG |
| 258 | LSSNEC85HC | QVQLVQSGAEVKKPGSSVKVSCKASGGTLSSYTISWVRQAPGQG |
| | | LEWMGRLIPLVDITTYAQKFQGRVTITADTSTNTAYMELSNLRSED |
| | | TAIYHCATSTMIAAVINDAFDLWGQGTTVTVSSASTKG |
| 259 | LSSNEC91HC | QVQLVQSGAEVKKPGASVKVSCKASGNTFTSYGITWVRQAPGQG |
| | | LEWMGWISAYNGNTNYAQKLQDRLTMTTDTSTSTAYMELRSLRS |
| | | DDTAVYYCAFSRHYGSGNYDYWGQGTLVTVSSASTKG |
| 260 | LSSNEC92HC | QVQLQQWGAGLLKPSETLSLTCAVYGGSFSGYYWSWIRQPPGK |
| | | GLEWIGEINHSGSTNYNPSLKSRVTISVDTSKNQFSLKLSSVTAAD |
| | | TAVYYCARLPIGSGWYGRDYWGQGTLVTVSSASTKG |
| 261 | 3A124HC | EVQLLESGGGLVRPGGSLXLSCSASGFTFNSYAMSWVRQAPGKG |
| | | LEWVSSVSASGEMTYYADSVRGRFTISRDNANNALHLQMNSLRA |
| | | EXTAVYYCAKVGGTVWSGYSNYLDYWGPGTLVTVSSASTKG |
| 262 | 3A125HC | QVQLVQSGAEVKKPGASVKVSCKPSSNTFTSHYIHWVRQAPGQG |
| | | LEWMGMINPGGSTRYAPKFQGRVTLTRDTSTRTVYMELSSLRSE |
| | | DTAVYYCARPQYNLGRDPLDVWGLGTMVTVSSASTKG |
| 263 | 3A140HC | EVQLVESGGGLVKPGGSLRLSCADSGFTFRSYSMHWVRQAPGK |
| | | GLAWVSSISSTSNYIYYADSVKGRFTISRDNAKNSLYLQMNSLRAE |
| | | DTAVYYCARTFITASWFDSWGQGTLVTVSSASTKG |
| 264 | 3A144HC | VSGGRFSNYGLSWVRQAPGQGLEWMGRIVPAINRAKYAQKFQG |
| | | RVILTADKITDTAYMELRSLRSEDTAIFYCARDPQIElRGNAFDIWG |
| | | QGTVVTVSSASTKG |
| 265 | 3A160HC | QVQLQESGPGLVKPSGTLSLTCNVYGGSMISYYWSWIRQPPGKG |
| | | LEWIGHVYNSGNTKYSPSLKNRVTISMDTSRNLFSLKVTSVTPADT |
| | | AVYYCARADYDNIWDSRGGFDLWGQGTLVTVSSASTKG |
| 266 | 3A18HC | QVQLVQLLQSGAEVKKPGSSVKVSCQISGYGFSNYAISWVRQAP |
| | | GQGLEWLGRIVPAVGMTEYAQKFQGRVTFTADRSTITAYMDLRGL |
| | | RSDDTAVYYCVRDPQVEVRGNAFDIWGQGTMVTVSSASTKG |
| 267 | 3A204HC | QVQLVQSGAEMKKPGASVKVSCKASGHTFTNYYMHWVRQAPGQ |
| | | GLEWMGMINPTGDSTRYAQRFQGRVTMTRDTSTRTVYMELSSLR |
| | | SDDTAVYYCARAHHDFWRAPVDVWGKGTTVTVSSASTKG |
| 268 | 3A228HC | EVQLVQSGAEVKKPGESLRISCKTSGYNFNDDWIAWVRQRPDKG |
| | | PEWMGIFYPGDSQATYSPSFQGHVTFSADTSISTAYLQWTSLKAS |
| | | DTAIYYCARTRCFGANCFNFMDVWGKGTALTVTVSSASTKG |
| 269 | 3A233HC | QVQLQESGPGPVKPSETLSLTCTVSGGSMISYYWSWIRQPPGKG |
| | | LEWIGYIFTNGRTTYSPSLRSRVTISLDTSTNHFSLRLKSVTAADTAI |
| | | YYCARLDGEAFRYYLDLWGQGNLVTVSSASTKG |
| 270 | 3A244HC | IRSFYWHWIRQSPGKGLEWLGSVFDNGLTTHNPSLKSRLTISEDP |
| | | SRNQISLKLRSMTAADTAVYYCARGDYDILTSSYQFDYWGQGTLV |
| | | AVSSASTKG |
| 271 | 3A255HC | QVQLQESGPGLVKPSETLSLTCTVFGASIRSFYWHWIRQSPGKGL |
| | | EWLGSVFDNGLTTYNPSLKNRLSISEDPSRNQISLNLRSMTAADTA |
| | | VYYCARADYDLLTSSYHFDSWGQGTLVTVSSASTKG |
| 272 | 3A296HC | QVQLQESGPGLVKPSETLSLTCTVSGGSISYYYWSWIRQPPGKGL |
| | | EWIGDIYYSGTTDYNPSLKSRVTISVDTSKNQFSLKLSSVTAADTA |
| | | VYYCARRRGQRLLAYFDYWGQGSLVTVSSASTKG |
| 273 | 3A334HC | QVQLVQSGAEVKKPGASVKVSCKAPGYTFIGHYMHWIRQAPGQG |
| | | LEWMGWINPNSGDTNYAQTFQGRVTMTRDTSISTAYMELTRLRS |
| | | DDTAVYYCARDLRPMRGNWAMHVWGEGTTVTVSSASTKG |
| 274 | 3A366HC | CTVSGGSISSAGYYWTWIRQHPGKGLEFIGYIYYIGTTYYNPSLKS |
| | | RLTISIDTSKNQFSLKLSSVTAADTAIYYCARDYTARGRHFFDYWG |
| | | QGALVTVSSASTKG |
| 275 | 3A381HC | SSFAISWVRQAPGQGLEWMGGIIPIFEATSYAQKFQDRLTITTDES |
| | | TTTAYMDLSSLRSEDTAVYYCARAQGDILTEGYFDYWGQGTLVTV |
| | | SSASTKG |
| 276 | 3A384HC | QVQLVQSGAEVKKPGSSVKVSCKVSFFSNYGISWVRQRPGQGLE |
| | | WMGRIIPAIDDMTYAQTFRGRVTFSADKFTTTAYMELTGLTFEDTA |
| | | TYFCARDPQVNRRGNCFDHWGQGTLVTVSSASTKG |
| 277 | 3A419HC | LEWMGRIIPAIDDVTYAQTFRGRVTFSADKFTTTAYMDLTGLRSED |
| | | TATYFCARDPQVNRRGNCFDHWGQGTLVTVSSASTKG |
| 278 | 3A461HC | QVQLVQSGAEVKKPGAAVKISCKASRFTFSSYYIHWVRQAPGQGL |
| | | EWMGIINPSGGSTSNAQKFQDRVTLTRDMSTGTVYMELSRLTSED |
| | | TAVYYCATPEPSSIVAPLYYWGQGTLVTVSSASTKG |
| 279 | 3A474HC | EVQLLESGGGLVQPGGSLRLSCAVSGFTFGGHAVSWVRQAPGK |
| | | GLEWLSQISGTGSRTDYADAVKGRFTVSRDNSKKTVYLQMNSLR |
| | | VEDTALFYCATRSPGGGYAFDIWGQGAMVTVSSASTKG |
| 280 | 3A518HC | QVQLQESGPGLVKPSETLSLTCTVSGGSISSAGYYWSWIRQHPEK |
| | | GLEFIGYIYYLGTTYYNPSLKSRVSISIDTSNNQFSLELSSVSAADTA |
| | | IYYCARDYTASGRHFFDYWGQGTLVTVSSASTKG |
| 281 | 3A539HC | EVQLLESGGALVQPGGSLRLSCAASGFTFSTSSMSWVRQAPGKG |
| | | LEWVSAIGSGRGSTFYADSVKGRFTISRDNSKNTLSLQMNSLTAE |
| | | DTATYYCTKTGGLLRFPEVWGKGTTVTVSSASTKG |
| 282 | 3A576HC | QVQLVQSGAEVKKPGSSVKVSCKASGGTFSNYAISWVRQAPGQG |
| | | LEWMGGIIPIFEAASYAQKFQDRLTITTDESTTTAYMDLSSLRSEDT |
| | | AIYYCARAQGDILTEGYFDYWGQGTLVTVSSASTKG |
| 283 | 3A613HC | QVQLQESGPGLVKPSETLSLTCTVSGGSISTYYWSWIRQPPGKGL |
| | | EWIGYISYSGSTNYNPSLKSRVTISVDTSKNQFSLKLSSVTAADTA |
| | | VYYCARHKSVLLWFRELDYWGQGTLVTVSSASTKG |
| 284 | 3A64HC | QVQLVQSGAEVKKPGSSVKVSCKTSGVRFSSNAISWVRQAPGQG |
| | | LEWMGRTTPMLGGANHAPSFKGRVTISADESTRTVYMEMSSLRY |
| | | EDTAVYYCASGRREGLNFLLDYWGQGTLVTVSSASTKG |
| 285 | 3A650HC | QVQLVQSGAEVRKPGASVKVSCKTSGYTFTNSYIHWVRQAPGQG |
| | | LEWMGIINPPGGNTYYAQKFHGRVTLTRDTSTSTVYMELNSLRSE |
| | | DTAVYFCARPHSPTNIPSRPLDYWGQGTLVTVSSASTKG |
| 286 | 3A67HC | QVQLVQSGAEVKKPGASVKVSCKVSGYPLAELSVHWVRQVPGK |
| | | GLEWVGGFDPEEGKTVYAQKFQGRVTMTEDRSTDTVYMELISLR |
| | | YEDTAVYYCATDNPVLQLGELSSSLDYWGQGTLVTVSSASTKG |
| 287 | 3A779HC | PSETLSLTCRVSGASISNFYWTWIRQPAGKGLEWIGRLYSSDKTN |
| | | YNPSLNGRVTMSLDTSKNQFSLRLTSMTDADTAIYYCAREKGQW |
| | | VTLPPYYFDSWGQGILVTVSSASTKG |
| 288 | 3A816HC | NTFTSHYVHWVRQAPGQGLEWMGMINPGGTTRYAPKFQDRVTL |
| | | TRDTSTRTVYMELRSLRSEDTAVYYCARPQYNLGREPLNVWGQG |
| | | TMVTVSSASTKG |
| 289 | 3A869HC | QVQLQESGPGLVKPSETLSLTCSVSGASISNFYWTWIRQPAGKGL |
| | | EWVGRLYSSDRTNYNPSLNGRVTMSLDTSKNQFSLRLTSMTDAD |
| | | TAIYFCAREKGQWLTVPPYYFDSWGQGILVTVSSASTKG |
| 290 | 3A93HC | CTVSGGSIISYYWNWIRQSPGKGLEWLGYIFDGGRANYNPSLRSR |
| | | LTMSVDTSKNQISLKVKSVTAADSAIYYCARLDGEAFRYYFDSWG |
| | | QGTLVTVSSASTKG |
| 291 | 3A966HC | QTLSLTCSVSGGSISSAGYYWGWIRQHPGKGLEWIGHIYYSGNTN |
| | | YNPSLKSRLSMSVETSKNQFSLNLASVTAADTAVYFCARDYSAAG |
| | | RHLFDSWGQGILVTVSSASTKG |
| 292 | 3A978HC | KPSQTLSLTCTVSGGSISSAGYYWTWIRHHPGKGLEFIGYIYHIGT |
| | | PYYNPSLKSRLTISIDTSKNQFSLKLSSVTAADTAIYYCARDYTARG |
| | | RHFFDYWGQGALVTVSSASTKG |
| 293 | 3ANC3HC | QVQLVQSGADVKKPGASVTVSCKTDEDEDDFRAHLVQWMRQAP |
| | | GQRLEWVGWIKPQTGQPSYAQKFQGRVTLTREVSTSTVFLQLRN |
| | | LRSDDTAVYYCARPRGGRDNWSFHVWGRGTLVTVSSASTKG |
| 294 | 3ANC42HC | QVQLVQSGAAVKKPGASVKVSCETYGYTFTDHFMHWWRQAPGQ |
| | | GLEWMGWINPYSSAVSYSPRYQGRVTMTRDTFLETVYMELRGLK |
| | | FDDTAIYYCATPKSGRDYWSFDLWGQGTLVTVSSASTKG |
| 295 | 3ANC66HC | QVQLVQSGAAVKKPGASVKVSCETYGYKFTDHFMHWWRQAPGQ |
| | | GLEWMGWINPYSSAVSYSPRYQGRVTMTRDTFLETVYMELRGLR |
| | | FDDTAIYYCATPKSGRDYWSFDLWGQGTLVTVSSASTKG |
| 296 | 3ANC79HC | QVQLVQSGAAVKKPGASVKVSCEAYGYKFTDHFMHWWRQAPGQ |
| | | GLEWMGWINPYTSAVNYSPKYQGRVTMTRDTFLETVYMELRGLR |
| | | VDDTAIYYCATPKSGRDYWSFDLWGQGTLVTVSSASTKG |
| 297 | 3B10HC | QVQLQESGPGLVKPSETLSLTCSVSNGSISSGGYYWSWLRQFPG |
| | | KGLEWIGSIHYTGRTMYNPSLMGRPALSMDTSNNQFSLKLRSVTA |
| | | ADTALYFCARDLQWIFVVDPWGQGTLVTVSSASTKG |
| 298 | 3B120HC | LQQLQVPRLSMWRVFKVAAATGAQTLTVEEPGSSVKVSCKASGG |
| | | SSTAYGYSWVRQAPGQGFEWMGRIIPFYGIITYAPKFQGRVTITAD |
| | | RSTSTVYMELTSLTFADTALFFCARDFGDPRNGYYFDSWDQGLW |
| | | LTVSSASTKG |
| 299 | 3B126HC | QVHLVQSGAEVKKPGSSVRVSCKASGWTFGDSVNSAITWVRQAP |
| | | GQGLEWMGRFIPILGLSNYAQKFQDRVTINVDRSTNTAYMELSGL |
| | | RSEDTAVYYCARLITGMNAPWFYYMDVWGKGTTITVSSASTKG |
| 300 | 3B129HC | FICFSVVVRLLEFGGRLVQPGGSLRLSCSASGFTFSNSAMSWVRQ |
| | | APGKGLEWVSSILSSGVGTFYADSVKGRFTVSRDNSRNTLYLQMK |
| | | SLRAEDTALYYCAKVQIQQLNFGVITDAGLDVWGKGTTLIVSSAST |
| | | KG |
| 301 | 3B142HC | QVQLGQSGTEVKKPGFSVKVSCKASGGSSTAYGYSWVRQAPGQ |
| | | GFEWMGRIIPFYGIITYAPKFQGRVTITADRSTSTVYMELTSLTFAD |
| | | TALFFCARDFGDPRNGYYFDSWDQGLWLTVSSASTKG |
| 302 | 3B154HC | QVQLVQSGGEVRKPGSSVKVPCKISGNAFSNYGVNWVRQAPGQ |
| | | GLEWVGRIIPVIGVAQHAPKFQGRVTITADKSTTTAYLELSSLRSDD |
| | | TAVYFCAKDHGDPRTGYYFDYWGQGALVTVSSASTKG |
| 303 | 3B165HC | QVQLLQSGTEVKKPGSSVKVSCRASGWTLGNSPNSAIGWVRQAP |
| | | GQGLEWIGRIIPILDVTNYAQKFQGRVTISADKSTNIAYMEISSLGSE |
| | | DTAFYYCARVITGMTSPWYFYMDVWGEGTTVIVSSASTKG |
| 304 | 3B171HC | VQSQVYLVQSGGEVKKPGSSVKVSCKASGDSFSSSVITWVRQAP |
| | | GQGPEWMGRIIPVLGVAAYAQNFYGRVTISADTSSNTAYMELSSL |
| | | RFEDTAVFYCARETGRGGNLALRQYFFDSWGQGTLVTVSSPSTKG |
| 305 | 3B17HC | EVQLVESGGGLVQPGGSLRISCSATGFTFSTHAMHWVRQAPGKG |
| | | LEYVSAINSNGRSAFYADSVKGRVTISRDNSKNTLFLQMTSLRAED |
| | | TAVYYCVKGPLLRYLDSWGQGTLVTVSSASTKG |
| 306 | 3B186HC | QVQLVESGGGLVKPGGSLRLSCAASGFSFNEYYMSWIRQAPGQG |
| | | LEWVANIGSSDAYTIYADSVKGRFTISRDNAENTVYLQMNSLRGE |
| | | DTAVYYCARIEGYCSNSRCSNYFDPWGQGALVTVSSASTKG |
| 307 | 3B193HC | MFLFLVAGATGVQSQVYLVPFGPEVKKPGSSVKVSCKASGDSFTS |
| | | SVITWVRQAPGQGPEWMGRVIPVLGVAAYAQKFYGRVTITADTSS |
| | | NTAYMEVNSLRFEDTAVYYCARETGRGGNLALRQYFFDSWGQGT |
| | | LVTVSSPSTKG |
| 308 | 3B22HC | CQVQLVESGGGVVQPGRSLRLSCVGSGFTFSSSGMHWVRQAPG |
| | | KGLEWVAVISSDGSDEYYGDSVEGRFTISRDNSKNTLFLQLDSLE |
| | | AEDSAVYYCAKTPPHYDALTGYPSSVLEFWGLGTLVTVSSASTKG |
| 309 | 3B27HC | EVQLVESGGGLVQPGGSLRISCSATGFTFSTHAMHWVRQAPGKG |
| | | LEYVSAINSNGRSAFYADSVKGRVTISRDNSKNTLFLQMTSLRAED |
| | | TAVYYCVKGPLLRYLDSWGQGTLVTVSSASTKG |
| 310 | 3B29HC | QVHLVQSGAEVKKPGSSVRVSCKASGWTFGDSVNSAITWVRQAP |
| | | GQGLEWMGRFIPILGLSNYAQKFQDRVTINVDRSTNTAYMELSGL |
| | | RSEDTAVYYCARLITGMNAPWFYYMDVWGKGTTITVSSASTKG |
| 311 | 3B2HC | SGGRLVQPGGSLRLSCSASGFTLSNSAMSWVRQAPGKGLEWVS |
| | | SILSSGVGTFYADSVKGRFTVSRDNSRNTLYLQMKSLRAEDTALY |
| | | YCAKVQIQQLNFGVITDAGLDVWGKGTTLIVSSASTKG |
| 312 | 3B31HC | EVQLVQSGAEVKKPGSSVKVSCKASGGTFTTYDISWVRQAPGQG |
| | | LEWIGGILPDFGAPSYAQKFQDRVTITTDESSRTAYMELNSLRSED |
| | | TAIYYCARGRGDDFWSGESPSWYFDYWGQGTQVTVSSASTKG |
| 313 | 3B33HC | PLVQLEPSGVEVKKRGASVKVSCKVSGYSLTELSMHWVRQAPGK |
| | | GLEWMGSFDPLDGDTIYAQKFQGRVTMTVDTSTDTAYMDLSSLR |
| | | FEDTAVYYCATPSKAYYYDSPNYEGDFYMDVWGKGTTVIVSSAST |
| | | KG |
| 314 | 3B40HC | QVQLVESGGGVVQPGRSLRLSCVGSGFTFSSSGMHWVRQAPGK |
| | | GLEWVAVISSDGSDEYYGDSVEGRFTISRDNSKNTLFLQLDSLEA |
| | | EDSAVYYCAKTPPHYDALTGYPSSVLEFWGLGTLVTVSSASTKG |
| 315 | 3B41HC | EVQLVQSGAEVKKPGASVKVSCKVSGYTLTELSMHWVRQAPGKG |
| | | LEWMGVFDPLEGDGVYAEKFRGRVIMTEDTSTDTGYMELTSLRS |
| | | EDTAIYYCATKAKDYYYESSDYSPYYYYYMDVWGKGTTVTVSSAS |
| | | TKG |
| 316 | 3B44HC | EVRLLESGGGLVQPGGSLRLSCSASGFTFSNSALSWVRQAPGKG |
| | | LEWVSSVVSSGGDTFYADSVKGRFTISRDNSRNTLYLQMKSLRAE |
| | | DTALYYCAKVQIQQLNFGVITDAGMDVWGKGTTVIVSSASTKG |
| 317 | 3B45HC | VEEPGSSVKVSCKASGGSSTAYGYSWVRQAPGQGFEWMGRIIPF |
| | | YGIITYAPKFQGRVTITADRSTSTVYMELTRLTFADTALFFCARDYG |
| | | DPRNGYYFDSWDQGLWLTVSSASTKG |
| 318 | 3B48HC | QVQLVESGGGLVQPGGSLRISCSATGFTFSTHAMHWVRQAPGKG |
| | | LEYVSAINSNGRSAFYADSVKGRVTISRDNSKNTLFLQMTSLRAED |
| | | TAVYYCVKGPLLRYLDSWGQGTLVTVSSASTKG |
| 319 | 3B50HC | QVQLVQSGPGLVKPSETLSLTCSVSNGSISSGGYYWSWLRQFPG |
| | | KGLEWIGSIHYTGRTFYNPSLMGRTALSMDTSNNQFSLKVSSVTA |
| | | ADTALYYCARELQWMFVVDPWGQGTLVTVSSASTKG |
| 320 | 3B51HC | QVQLLQSGTEVKKPGSSVKVSCRASGWTLGNSPNSAIGWVRQAP |
| | | GQGLEWIGRIIPILDVTNYAQKFQGRVTISADKSTNIAYMEISSLGSE |
| | | DTAFYYCARVITGMTSPWYFYMDVWGEGTTVIVSSASTKG |
| 321 | 3B56HC | QVQLVQSGGEVKKPGASVKVSCKVSGYSLTELSMHWVRQAPGK |
| | | GLEWMGVFDPLEGDGVYVQKFRGRVIMTEDTSTDTAYMELTSLR |
| | | SEDTAIYYCATKAKDYYYESSDYSPYYYYYMDVWGKGTTVTVSSA |
| | | STKG |
| 322 | 3B57HC | GSEVQLVESGAEVKKRGASVKVSCKVSGYSLTELSMHWVRQAPG |
| | | KGLEWMGSFDPLDGDTIYAQKFQGRVTMTVDTSTDTAYMDLSSL |
| | | RFEDTAVYYCATPSKAYYYDSPNYEGDFYMDVWGKGTTVIVSSA |
| | | STKG |
| 323 | 3B5HC | SVVQLVESGPGLVKPSETLSLTCSVSNGSISSGGYYWSWLRQFP |
| | | GKGLEWIGSIHYTGRTMYNPSLMGRPALSMDTSNNQFSLKLRSVT |
| | | AADTALYFCARDLQWIFVVDPWGQGTLVTVSSASTKG |
| 324 | 3B61HC | SVDERLLEFGGRLVQPGGSLRLSCSASGFTFSNSAMSWVRQAPG |
| | | KGLEWVSSILSSGVGTFYADSVKGRFTVSRDNSRNTLYLQMKSLR |
| | | AEDTALYYCAKVQIQQLNFGVITDAGLDVWGKGTTLIVSSASTKG |
| 325 | 3B6HC | QLQLKESGPGMVKPSETLSLTCSVSGASVVSANDYWGWIRQAPG |
| | | KGLECIGIILYTGSTFYNPSLQSRVTISRDPSKNHVSLTLTSVTAADS |
| | | AVYYCARIPYHSESYYNVVIGGFDVWGQGTRVTVSSASTKG |
| 326 | 3B77HC | QVHLVQSGAEVKKPGSSVRVSCKASGWTFGDSVNSAITWVRQAP |
| | | GQGLEWMGRFIPILGLSNYAQKFQDRVTINVDRSTNTAYMELSGL |
| | | RSEDTAVYYCARLITGMNAPWFYYMDVWGKGTTITVSSASTKG |
| 327 | 3B79HC | QVQLGQSGTEVKKPGFSVKVSCKASGGSSTAYGYSWVRQAPGQ |
| | | GFEWMGRIIPFYGIITYAPKFQGRVTITADRSTSTVYMELTSLTFAD |
| | | TALFFCARDFGDPRNGYYFDSWDQGLWLTVSSASTKG |
| 328 | 3B84HC | SQVQLVESGPGLVKPSETLSLTCSVSNGSISSGGYYWSWLRQFP |
| | | GKGLEWIGSIHYTGRTMYNPSLMGRPALSMDTSNNQFSLKLSSVT |
| | | AADTALYFCARDLQWIFVVDPWGQGTLVTVSSASTKG |
| 329 | 3B86HC | RVHSQVQLVESGPGLVKPSQTLSLTCTVSGGSISNGGHYWNWIR |
| | | QHPGKGLEWIGHIYNIATTYYNPSLKSRVSISVDTSKNQFSLKLSSV |
| | | TAADTAVYYCARGSGRWTIGARIYFDNWGQGALVAVSSASTKG |
| 330 | 3B8HC | QVQLVQSGGEVRKPGSSVKVPCKISGNAFSNYGVNWVRQAPGQ |
| | | GLEWVGRIIPVIGVAQHAPKFQGRVTITADKSTTTAYLELSSLRSDD |
| | | TAVYFCAKDHGDPRTGYYFDYWGQGALVTVSSASTKG |
| 331 | 3B93HC | QVHLVQSGAEVKKPGSSVRVSCEASGWTFGSVNSAITWVRQAPG |
| | | QGLEWMGRTIPFLGISNYAQKFQGRVTITADKSTNIAYVDVTSLTS |
| | | QDTAVYYCARLITGMTAPWFYYMDVWGKGTTVTVSSASTKG |
| 332 | 3BNC101HC | EVQLVQSGSDVKKPGTTVTISCKADEDEDDFTAYNYFMHWVRQA |
| | | PGQGLEWIGWINPRTGQPNHAKQLQGRVTLTRERSTSTVFMKLT |
| | | NLRLDDTAVYFCARPLRGGDTWHYHSWGRGTSLIVSSASTKG |
| 333 | 3BNC124HC | QSQVHLVQSGAEVKKPGSSVKVSCQASGGTFNTFAINWVRQAPG |
| | | QGLEWVGGIIPVFGTASYAQKFQGRVTVTTDESRGTAYMELNSLR |
| | | SEDTAVYYCARGQTDLNDDLWSDYSTPGFDYWGQGTLVTVSSAS |
| | | TKG |
| 334 | 3BNC130HC | RVQLGQSGAEVKKPGASVKVSCKVSGNSLTEFSIHWVRQAPGKG |
| | | LEWMGGFDPEEGETVPAQKFKGRVTMTEDTSTNTAYMELSSLRS |
| | | EDTAVYYCSTEPREMGTLTAGFEYWGQGTLVIVSSASTKG |
| 335 | 3BNC149HC | QPQLVQSGSGAEVKKPGASVRISCEASEYNVFDHFMQWVRQAP |
| | | MEGLEWMGWINPRGGYPSYSPTFQGRLTFTRQPSWDDSTITFHM |
| | | ELRGLRHDDTAVYYCARPHSPDDAWSLDVWGRGTLVTVSSASTKG |
| 336 | 3BNC177HC | LQPRVHSEVQLVESGAEVKKPGASVKVSCKVSGYTLSDLSMHWV |
| | | RQAPGKGLEWMGGFDEEDGEITYAQKFQGRVSMTEDTSRDTAY |
| | | MELSSLRSEDTAVYYCATAPRLELGELSSGFHYWGLGTLVTVSSA |
| | | STKG |
| 337 | 3BNC17HC | RVQLGQSGAEVKKPGASVKVSCKVSGNSLTEFSIHWVRQAPGKG |
| | | LEWMGGFDPEEGETVPAQKFKGRVTMTEDTSTNTAYMELSSLRS |
| | | EDTAVYYCSTEPREMGTLTAGFEYWGQGTLVIVSSASTKG |
| 338 | 3BNC48HC | IWAPLIAVTFLVLHCESLGTCCCCQASGGTFNTFAINWVRQAPGQ |
| | | GLEWVGGIIPVFGTASYAQKFQGRVTVTTDESRGTAYMELNSLRS |
| | | EDTAVYYCARGQTDLNDDLWSDYSTPGFDYWGQGTLVTVSSAST |
| | | KG |
| 339 | 3BNC58HC | EVQLVESGAEVKKPGASVKVSCKVSGYTLSDLSMHWVRQAPGKG |
| | | LEWMGGFDEEDGEITYAQKFQGRVSMTEDTSRDTAYMELSSLRS |
| | | EDTAVYYCATAPRLELGELSSGFHYWGLGTLVTVSSASTKG |
| 340 | 3BNC78HC | EVQLVESGAEVKKPGASVKVACKVSGKKLSDLSIHWVRQAPGKG |
| | | LEWMGGFDEEDGKISYERKFQGRVTMTEDTARDTAFMEMSSLRS |
| | | DDTAVYFCAAAPRLDLGELSSGFHFWGLGTLVSVSSASTKG |
| 341 | 3BNC82HC | CNPRVHSEVQLVESGAEVKKPGASVKVACKVSGKKLSDLSIHWV |
| | | RQAPGKGLEWMGGFDEEDGKISYERKFQGRVSMTEDTARDTAF |
| | | MEMSSLRSDDTAVYFCAAAPRLDLGELSSGFHFWGLGTLVTVSS |
| | | ASTKG |
| 342 | 3BNC8HC | EVQLVESGAEVKKPGASVKVSCKVSGNSLTEFSIHWVRQAPGKG |
| | | LEWMGGFDPEEGETVPAQKFKGRLTMTEDTSTNTAYMELSSLRS |
| | | EDTAVYYCSTEPREMGTLTAGFEYWGQGTLVTVSSASTKG |
| 343 | 3a426hc | QVQLQESGPGLVKPSETXSLTCSVSNGSISSGGYYWSWLRQFPG |
| | | KGLEWIGSIHYTGRTMYNPSLMGRPALSMDTSNNQFSLKLSSVTA |
| | | ADTALYFCARDLQWIFVVDPWGQGTLVTVSSASTKG |
| 344 | 3a515hc | QVQLVQSGAEVKKPGSSVKVSCKASGGTFTTYDISWVRQAPGQG |
| | | LEWMGGILPDFGAPSYAQKFQDRVTITTDESSSTAYMELNSLRSE |
| | | DTAIYYCARGRGDDFWSGESPSWYFDYWGQGTLVTVSSASTKG |
| 345 | 3b46HC | GYSEVQLVQSGPGLVKPSQTLSLTCTVSGGSISNGGHYWNWIRQ |
| | | HPGKGLEWIGHIYNIATTYYNPSLKSRVSISVDTSKNQFSLKLSSVT |
| | | AADTAVYYCARGSGRWTIGARIYFDNWGQGALVAVSSASTKG |
| 346 | 3ANC32HC | QVQLVQSGADVKKPGATVTVSCKTDEDEDDFRAHLMQWMRQAP |
| | | GQRLEWVGWIKPQTGQPSYGQKFQGRVTLTREVSTSTVFLQLRN |
| | | LRSDDTAVYYCARPRGGRDNWSFHVWGRGTLVTVSSASTKG |
| 347 | 3ANC3HC | QVQLVQSGADVKKPGASVTVSCKTDEDEDDFRAHLVQWMRQAP |
| | | GQRLEWVGWIKPQTGQPSYAQKFQGRVTLTREVSTSTVFLQLRN |
| | | LRSDDTAVYYCARPRGGRDNWSFHVWGRGTLVTVSSASTKG |
| 348 | 3ANC41HC | QVQLVQSGAAVKKPGASVKVSCETYGYTFTDHFMHWWRQAPGQ |
| | | GLEWMGWINPYSSAVSYSPRYQGRVTMTRDTFLETVYMELRGLK |
| | | FDDTAIYYCATPKSGRDYWSFDLWGQGTLVTVSSASTKG |
| 349 | 3ANC42HC | QVQLVQSGAAVKKPGASVKVSCETYGYTFTDHFMHWWRQAPGQ |
| | | GLEWMGWINPYSSAVSYSPRYQGRVTMTRDTFLETVYMELRGLK |
| | | FDDTAIYYCATPKSGRDYWSFDLWGQGTLVTVSSASTKG |
| 350 | 3ANC66HC | QVQLVQSGAAVKKPGASVKVSCETYGYKFTDHFMHWWRQAPGQ |
| | | GLEWMGWINPYSSAVSYSPRYQGRVTMTRDTFLETVYMELRGLR |
| | | FDDTAIYYCATPKSGRDYWSFDLWGQGTLVTVSSASTKG |
| 351 | 3ANC70HC | QVQLVQSGAAVKKPGASVKVSCETYGYKFTDHFMHWWRQAPGQ |
| | | GLEWMGWINPYSSAVSYSPRYQGRVTMTRDTFLETVYMELRGLR |
| | | FDDTAIYYCATPKSGRDYWSFDLWGQGTLVTVSSASTKG |
| 352 | 3ANC75HC | QVQLVQSGAAVKKPGASVKVSCETYGYTFTDHFMHWWRQAPGQ |
| | | GLEWMGWINPYSSAVSYSPRYQGRVTMTRDTFLETVYMELRGLK |
| | | FDDTAIYYCATPKSGRDYWSFDLWGQGTLVTVSSASTKG |
| 353 | 3ANC79HC | QVQLVQSGAAVKKPGASVKVSCEAYGYKFTDHFMHWWRQAPGQ |
| | | GLEWMGWINPYTSAVNYSPKYQGRVTMTRDTFLETVYMELRGLR |
| | | VDDTAIYYCATPKSGRDYWSFDLWGQGTLVTVSSASTKG |
| 354 | 3ANC87HC | QVQLVQSGGAVKKPGASVKVSCETYGYTFTDHFMHWWRQAPGQ |
| | | GLEWMGWINPYSSAVSYSPRYQGRVTMTRDTFLETVYMELRGLK |
| | | FDDTAIYYCATPKSGRDYWSFDLWGQGTLVTVSSASTKG |
| 355 | 3ANC8HC | QVQLVQSGADVKKPGASVTVSCKTDEDEDDFRAHLVQWMRQAP |
| | | GQRLEWVGWIKPQTGQPSYAQKFQGRVTLTREVSTSTVFLQLRN |
| | | LRSDDTAVYYCARPRGGRDNWSFHVWGRGTLVTVSSASTKG |
| 356 | 3ANC96HC | QVQLVQSGADVKKPGASVTVSCKTDEDEDDFRAHLVQWMRQAP |
| | | GQRLEWVGWIKPQTGQPSYAQKFQGRVTLTREVSTSTVFLQLRN |
| | | LRSDDTAVYYCARPRGGRDNWSFHVWGRGTLVTVSSASTKG |
| 357 | 3B106HC | QVQLLQSGAAVTKPGASVRVSCEASGYNIRDYFIHWWRQAPGQG |
| | | LQWVGWINPKTGQPNNPRQFQGRVSLTRHASWDFDTFSFYMDL |
| | | KALRSDDTAVYFCARQRSDYWDFDVWGSGTQVIVSSASTKG |
| 358 | 3B16HC | QVQLLQSGAAVTKPGASVRVSCEASGYNIRDYFIHWWRQAPGQG |
| | | LQWVGWINPKTGQPNNPCQFQGRVSLTRHASWDFDTFSFYMDL |
| | | KALRSDDTAVYFCARQRSDYWDFDVWGSGTQVTVSSASTK |
| 359 | 3B180HC | QVQLLQSGAAVTKPGASVRVSCEASGYNIRDYFIHWWRQAPGQG |
| | | LQWVGWINPKTGQPNNPCQFQGRVSLTRQASWDFDTISFYMDLK |
| | | ALRLDDTAVYFCARQRSDYWDFDVWGSGTQVTVSSASTKG |
| 360 | 3B183HC | QVRLLQSGAAVTKPGASVRVSCEASGYEIRDYFIHWWRQAPGQG |
| | | LQWVGWINPKTGQPNNPRQFQGRVSLTRQASWDFDSYSFYMDL |
| | | KALRSDDTAVYFCARQRSDYWDFDVWGSGSQVTVSSASTKG |
| 361 | 3B191HC | QVRLLQSGAAVTKPGASVRVSCEASGYEIRDYFIHWWRQAPGQG |
| | | LQWVGWINPKTGQPNNPRQFQGRVSLTRQASWDFDSYSFYMDL |
| | | KALRSDDTGVYFCARQRSDYWDFDVWGSGTQVTVSSASTKG |
| 362 | 3B21HC | QVRLLQSGAAVTKPGASVRVSCEASGYEIRDYFIHWWRQAPGQG |
| | | LQWVGWINPKTGQPNNPRQFQGRVSLTRQASWDFDSYSFYMDL |
| | | KALRSDDTAVYFCARQRSDYWDFDVWGSGTQVTVSSASTKG |
| 363 | 3BBM60 | QVHLSQSGAVVTKPGASVRVSCEASGYKISDHFIHWWRQAPGQG |
| | | PQWVGWINPKTGQPNNPRQFQGRISLTRQASWDFDTFSFYMDLK |
| | | ALRSDDTAVYFCARHRSDYWDFDVWGSGTQVTVSSASTKG |
| 364 | 3BBM60 | QVHLSQSGAAVTKPGASVRVSCEASGYKISDHFIHWWRQAPGQG |
| | | LQWVGWINPKTGQPNNPRQFQGRISLTRQASWDFDTFSFYMDLK |
| | | ALRSDDTAVYFCARQRSDYRDFDVWGSGTQVTVSSASTKG |
| 365 | 3BBM60 | QVHLSQSGAAVTKPGASVRVSCEASGYKIRDYSIHWWRQAPGQG |
| | | LQWVGWINPQTGQPNIPRPFQGRISLTRQASWDFDTFSFYMDLE |
| | | ALRSDDTAVYFCARQRSDYWDFDVWGSGTQVTVSSASTKG |
| 366 | 3BBM60 | QVHLSQSGAVVTKPGASVRVSCEASGYKISDHFIHWWRQAPGQG |
| | | LQWVGWINPKTGQPNNPRQFQGRISLTRQASWDFDTFSFYMDLE |
| | | ALRSDDTAVYFCARQRSDYWDFDVWGSGTQVTVSSASTKG |
| 367 | 3BBM60 | QVHLSQSGAVVTKPGASVRVSCEASGYKISDHFIHWWRQAPGQG |
| | | LQWVGWINPKTGQPNNPRQFQGRISLTRQASWDFDTFSFYMDLK |
| | | ALRSDDTAVYFCARHRSDYWDFDVWGSGTQVTVSSASTKG |
| 368 | 3BBM60 | QVHLSQSGAAVTKPGASVRVSCEASGYKISDHFIHWWRQAPGQG |
| | | LQWVGWINPKTGQPNNPRQFQGRVSLTRQASWDFDTYSFYMGL |
| | | KAVRSDDTAIYFCARQRSDFWDFDVWGSGTQVTVSSASTKG |
| 369 | 3BBM60 | QVHLSQSGAAVTKPGASVRVSCEASGYKISDHFIHWWRQAPGQG |
| | | LQWVGWINPKTGQPNNPRQFQGRISLTRQASWDFDTFSFYMDLK |
| | | ALRSDDTAVYFCARHRSDYWDFDVWGSGTQVTVSSASTKG |
| 370 | 3BBM60 | QVHLSQSGAVVTKPGASVRVSCEASGYKISGHFIHWWRQAPGQG |
| | | LQWVGWINPKTGQPNNPRQFQGRISLTRQASWDFDTFSFYMDLK |
| | | ALRSDDTAVYFCARHRSDYWDFDVWGSGTQVTVSSASTKG |
| 371 | 3BBM60 | QVHLSQSGAVVTKPGASVRVSCEASGYKISDHFIHWWRQAPGQG |
| | | LQWVGWINPKTGQPNIPRQFQGRISLTRQASGDFDTFSFYMDLKA |
| | | LRSDDTAVYFCARQRSDYWDFGVWGSGTQVTVSSASTKG |
| 372 | 3BBM60 | QVHLSQSGAVVTKPGASVRVSCEASGYKISDHFIHWWRQAPGQG |
| | | LQWVGWINPKTGQPNNPRQFQGRISLTRQASWDIDTFSFYMDLK |
| | | ALRSDDTAVYFCARHRSDYWDFDVWGSGTQVTVSSASTKG |
| 373 | 3BBM60 | QVHLSQSGAVVTKPGASVRVSCEASGYKISDHFIHWWRQAPGQG |
| | | LQWVGWINPKTGQPNNPRQFQGRISLTRQASWDFDTFSFYMDLK |
| | | ALRSDDTAVYFCARQRSDYWDFDVWGSGTQVTVSSASTKG |
| 374 | 3BBM60 | QVHLSHSGAAVTKPGASVRVSCEASGYKISDHFIHWWRQAPGQG |
| | | LQWVGWINPKTGQPNNPRQFQGRISLTRQASWDFDTFSFYMDLK |
| | | ALRSDDTAVYFCARQRSDYWDFDVWGSGTQVTVSSASTKG |
| 375 | 3BBM60 | QVHLSQSGAVVTKPGASVRVSCEASGYKISDHFIHWWRQAPGQG |
| | | LQWVGWINPKTGQPNNPRQFQGRISLTRQASWDFDTFSFYMDLK |
| | | ALRSDDTAVYFCARHRSDYWDFDVWGSGTQVTVSSASTKG |
| 376 | 3BBM60 | QVHLSQSGAVVTKPGASVRVSCEASGYKISDHFIHWWRQAPGQG |
| | | LQWVGWINPKTGQPNNPRQFQGRISLTRQASWDFDTFSFYMDLK |
| | | ALRSDDTAVYFCARHRSDYWDFDVWGSGTQVTVSSASTKG |
| 377 | 3BBM60 | QVHLSQSGAAVTKPGASVRVSCEASGYKISDHFIHWWRQAPGQG |
| | | LQWVGWINPKTGQPNNPRQFQGRISLTRQASWDFDTFSFYMDLK |
| | | ALRSDDTAVYFCARHRSDYWDFDVWGSGTQVTVSSASTKG |
| 378 | 3BNC101HC | EVQLVQSGSDVKKPGTTVTISCKADEDEDDFTAYNYFMHWVRQA |
| | | PGQGLEWIGWINPRTGQPNHAKQLQGRVTLTRERSTSTVFMKLT |
| | | NLRLDDTAVYFCARPLRGGDTWHYHSWGRGTSLIVSSASTKG |
| 379 | 3BNC102HC | QPQLVQSGSGAEVKKPGASVRISCEASEYNVFDHFMQWVRQAP |
| | | GQGLEWMGWINPRGGYPSYSPRFQGRLTFTRQPSWDDSSVTFH |
| | | MELRGLRHDDTAVYYCARPHSPDDAWSLDVWGRGTLVTVSSAST |
| | | KG |
| 380 | 3BNC104HC | EVQLVQSGSDVRKPGATVTVSCKADEDEDDFTAYNYFMHWVRQ |
| | | APGHGLEWIGWINPRTGQPNHAKQFQGRVTLTRERSTSTVFMKL |
| | | TNLRLDDTAVYFCARPLRGGDTWHYHSWGRGTSLTVSSASTKG |
| 381 | 3BNC105HC | HVQLLQSGAAVTKPGASVRVSCEASGYNIRDYFIHWWRQAPGQG |
| | | LQWVGWINPKTGQPNNPRQFQGRVSLTRQASWDFDTFSFYMDL |
| | | KALRLDDTAIYFCARQRSDYWDFDVWGSGTQVTVSSASTKG |
| 382 | 3BNC106HC | VVQLVQSGSDVRKPGATVTVSCKADEDEDDFTAYNYFMHWVRQ |
| | | APGHGLEWIGWINPRTGQPNHAKQFQGRVTLTRERSTSTVFMKL |
| | | TNLRLDDTAVYFCARPLRGGDTWHYHSWGRGTSLTVSSASTKG |
| 383 | 3BNC107HC | QVQLVQSGAALKKPGASLRISCQAYGYKFTDYLIHWWRQAPGQG |
| | | LEWIGWIKPETGQPSYSYKFQGRVSLTRDTFEEILFMDLRGLRSD |
| | | DTAIYFCARRHSDYCDFDVWGGGSQVLVSSASTKG |
| 384 | 3BNC108HC | QVQLVQSGTAVKKPGASVRVSCQASGYTFTDYFIYWWRQAPGQ |
| | | GLEWLGWINPRTSQPSYPYRFQGRVTLTRDIFEEMLYMDLRGLRS |
| | | DDTGIYFCARRHSDYCDFDIWGSGTQIIVSSASTKG |
| 385 | 3BNC10HC | EVQLVQSGSDVRKPGATVTVSCKADEDEDDFTAYNYFMHWVRQ |
| | | APGHGLEWIGWINPRTGQPNHAKQFQGRVTLTRERSTSTVFMKL |
| | | TNLRLDDTAVYFCARPLRGGDTWHYHSWGRGTSLTVSSASTKG |
| 386 | 3BNC114HC | EVQLVQSGSDVRKPGATVTVSCKADEDEDDFTAYNYFMHWVRQ |
| | | APGHGLEWIGWINPRTGQPNHAKQFQGRVTLTRERSTSTVFMKL |
| | | TNLRLDDTAVYFCARPLRGGDTWHYHSWGRGTSLTVSSASTKG |
| 387 | 3BNC117HC | QVQLLQSGAAVTKPGASVRVSCEASGYNIRDYFIHWWRQAPGQG |
| | | LQWVGWINPKTGQPNNPRQFQGRVSLTRHASWDFDTFSFYMDL |
| | | KALRSDDTAVYFCARQRSDYWDFDVWGSGTQVTVSSASTKG |
| 388 | 3BNC126HC | QPQLVQSGSGAEVKKPGASVRISCEASEYNVFDHFMQWVRQAP |
| | | GQGLEWMGWINPRGGYPSYSPTFQGRLTFTRQPSWDDSTITFH |
| | | MELRGLGHDDTAVYYCARPHSPDDAWSLDVWGRGTLVTVSSAS |
| | | TKG |
| 389 | 3BNC127HC | EVQLVESGSDVRKPGATVTVSCKADEDEDDFTAYNYFMHWVRQA |
| | | PGQGLEWIGWINPRTGQPNHAKQFQGRVTLTRERSTSTVFMKLT |
| | | NLRLDDTAVYFCARPLRGGDTWHYHSWGRGTSLTVSSASTKG |
| 390 | 3BNC134HC | QVQLVQSGAALKKPGASLRISCQAYGYKFTDHLIYWWRQAPGQG |
| | | LEWIGWIKPETGQPSYSYKFQGRVSLTRDTFQEILFMNLRGLRSD |
| | | DTAIYFCARRHSDYCDFDVWGSGSQILVSSASTKG |
| 391 | 3BNC140HC | EVQLVQSGSDVRKPGATVTVSCKADEDEDDFTAYNYFMHWVRQ |
| | | APGHGLEWIGWINPRTGQPNHAKQFQGRVTLTRERSTSTVFMKL |
| | | TNLRLDDTAVYFCARPLRGGDTWHYHSWGRGTSLTVSSASTKG |
| 392 | 3BNC141HC | VVQLVQSGSDVRKPGATVTVSCKADEDEDDFTAYNYFMHWVRQ |
| | | APGHGLEWIGWINPRTGQPNHAKQFQGRVTLTRERSTSTVFMKL |
| | | TNLRLDDTAVYFCARPLRGGDTWHYHSWGRGTSLTVSSASTKG |
| 393 | 3BNC142HC | QVQLVQSGAALKKPGASVRISCQAYGYKFTDHLIYWWRQAPGQG |
| | | LEWIGWIKPETGQPSYSYKFQGRVTLTRDTFEEIHFMDLRGLRYD |
| | | DTATYFCARRHSDYCDFDVWGSGSQVSVSSASTKG |
| 394 | 3BNC148HC | QVQLVQSGSDVRKPGATVTVSCKADEDEDDFTAYNYFMHWVRQ |
| | | APGHGLEWIGWINPRTGQPNHAKQFQGRVTLTRERSTSTVFMKL |
| | | TNLRLDDTAVYFCARPLRGGDTWHYHSRGRGTSLTVSSASTKG |
| 395 | 3BNC149HC | QPQLVQSGSGAEVKKPGASVRISCEASEYNVFDHFMQWVRQAP |
| | | MEGLEWMGWINPRGGYPSYSPTFQGRLTFTRQPSWDDSTITFHM |
| | | ELRGLRHDDTAVYYCARPHSPDDAWSLDVWGRGTLVTVSSASTKG |
| 396 | 3BNC151HC | QVQLVQSGATLKKPGASVRISCQAYGYKFTDHLIHWWRQAPGQG |
| | | LEWIGWIKPETGQPSYAYKFQGRVSLTRDTFEEILFMDLRGLRSD |
| | | DTAIYFCARRHSDYCDLDVWGGGTQLLVSSASTKG |
| 397 | 3BNC153HC | QVQLVQSGAALKKPGASLRISCLTYGYKFTDHLIYWWRQAPGQGL |
| | | EWIGWIKPETGQPSYSYRFQGRVSLTRDTFEEIVFMDLRGLRSDD |
| | | TAIYFCARRHSDYCDFDVWGSGSQVIVSSASTKG |
| 398 | 3BNC156HC | QVQLVQSGAALKKPGASLRISCQTYGYKFTDHLIYWWRQAPGQG |
| | | LEWIGWIKPETGQPSYSYRFQGRVSLTRDTFEEIVFMDLRGLRSD |
| | | DTAIYFCARRHSDYCDFDVWGGGSQVIVSSASTKG |
| 399 | 3BNC158HC | QVQLVQSGAALKKPGASLRISCQTYGYKFTDHLIYWWRQAPGQG |
| | | LEWIGWIKPETGQPSYSYRFQGRVSLTRDTFEEIVFMDLRGLRSD |
| | | DTAIYFCARRHSDYCDFDVWGSGSQVIVSSASTKG |
| 400 | 3BNC159HC | QVQLVQSGAALKKPGASVRISCQTYGYKFTDHLIHWWRQAPGQG |
| | | LEWIGWIKPDTGQPSYSSRFQGRVSLTRDTFEEIVFMDLRGLRSD |
| | | DTAIYFCARRHSDYCDFDVWGSGSQVLVSSASTKG |
| 401 | 3BNC15HC | QVQLVQSGAALKKPGASLRISCQTYGYKFTDHLIYWWRQAPGQG |
| | | LEWIGWIKPETGQPSYSYRFQGRVSLTRDTFEEIVFMDLRGLRSD |
| | | DTAIYFCARRHSDYCDFDVWGSGSQVLVSSASTKG |
| 402 | 3BNC173HC | QVQLVQSGSDVRKPGATVTVSCKADEDEDDFTAYNYFMHWVRQ |
| | | APGHGLEWIGWINPRTGQPNHAKQFQGRVTLTRERSTSTVFMKL |
| | | TNLRLDDTAVYFCARPLRGGDTWHYHSWGRGTSLTVSSASTKG |
| 403 | 3BNC175HC | EVQLVQSGSDVRKPGATVTVSCKADEDEDDFTAYNYFMHWVRQ |
| | | APGHGLEWIGWINPRTGQPNHAKQFQGRVTLTRERSTSTVFMKL |
| | | TNLRLDDTAVYFCARPLRGGDTWHYHSWGRGTSLTVSSASTKG |
| 404 | 3BNC176HC | QVQLLQSGAAVTKPGASVRVSCEASGYNIRDYFIHWWRQAPGQG |
| | | LQWVGWINPKTGQPNNPRQFQGRVSLTRHASWDFDTFSFYMDL |
| | | KGLRSDDTAIYFCARQRSDYWDFDVWGSGTQVTVSSASTKG |
| 405 | 3BNC181HC | EVQLVQSGSDVRKPGATVTVSCKADEDEDDFTAYDYFMHWVRQ |
| | | APGHGLEWIGWINPRTGQPNHAKQFQGRVTLTRERSTSTVFMKL |
| | | TNLRLDDTAVYFCARPLRGGDTWHYHSWGRGTSLTVSSASTKG |
| 406 | 3BNC186HC | EVQLVQSGSDVRKPGATVTVSCKADEDEDDFTAYNYFMHWVRQ |
| | | APGHGLEWIGWINPRTGQPNHAKQFQGRVTLTRERSTSTVFMKL |
| | | TNLRLDDTAVYFCARPLRGGDTWHYHSWGRGTSLTVSSASTKG |
| 407 | 3BNC18HC | EVQLVQSGSDVRKPGATVTVSCKADEDEDDFTAYNYFMHWVRQ |
| | | APGHGLEWIGWINPRTGQPNHAKQFQGRVTLTRERSTSTVFMKL |
| | | TNLRLDDTAVYFCARPLRGGDTWHYHSWGRGTSLTVSSASTKG |
| 408 | 3BNC193HC | QVQLVQSGTAVKKPGASVRVSCQASGYTFTDYFIYWWRQAPGQ |
| | | GLEWLGWINPRTSQPSYPYRFQGRVTLTRDIFEEMLYMDLRGLRS |
| | | DDTGIYFCARRHSDYCDFDIWGSGTQIIVSSASTKG |
| 409 | 3BNC196HC | QVQLLQSGAAVTKPGASVRVSCEASGYKISDHFIHWWRQAPGQG |
| | | LQWVGWINPKTGQPNNPRQFQGRISLTRQASWDFDTFSFYMDLK |
| | | ALRSDDTAVYFCARQRSDYWDFDVWGSGTQVTVSSASTKG |
| 410 | 3BNC20HC | QVQLVQSGSDVRKPGATVTVSCKADEDEDDFTAYNYFMHWVRQ |
| | | APGHGLEWIGWINPRTGQPNHAKQFQGRVTLTRERSTSTVFMKL |
| | | TNLRLDDTAVYFCARPLRGGDTWHYHSWGRGTSLTVSSASTKG |
| 411 | 3BNC29HC | WQLVQSGSDVRKPGATVTVSCKADEDEDDFTAYNYFMHWVRQ |
| | | APGHGLEWIGWINPRTGQPNHAKQFQGRVTLTRERSTSTVFMKL |
| | | TNLRLDDTAVYFCARPLRGGDTWHYHSWGRGTSLTVSSASTKG |
| 412 | 3BNC31HC | QVQLVQSGAALKKPGASVRISCQTYGYKFTDHLIYWWRQAPGQG |
| | | LEWIGWIKPETGQPSYSYRFQGRVSLTRDTFEEIVFMDLRGLRSD |
| | | DTAIYFCARRHSDYCDFDVWGSGSQVLVSSASTKG |
| 413 | 3BNC33HC | WQLVQSGSDVRKPGATVTVSCKADEDEDDFTAYNYFMHWVRQ |
| | | APGHGLEWIGWINPRTGQPNHAKQFQGRVTLTRERSTSTVFMKL |
| | | TNLRLDDTAVYFCARPLRGGDTWHYHSWGRGTSLTVSSASTKG |
| 414 | 3BNC42HC | QVQLVQSGAALKKPGASVRISCQAYGYKFTDYLIHWWRQAPGQG |
| | | LEWIGWIKPETGQPSYSYKFQGRVTLTRDTFEEILFMDLRGLRSDD |
| | | TAIYFCARRHSDYCDFDVWGSGSQVIVSSASTKGA |
| 415 | 3BNC44HC | EVQLVESGSDVRKPGATVTVSCKADEDEDDFTAYNYFMHWVRQA |
| | | PGHGLEWIGWINPRTGQPNHAKQFQGRVTLTRERSTSTVFMKLT |
| | | NLRLDDTAVYFCARPLRGGDTWHYHSWGRGTSLTVSSASTKG |
| 416 | 3BNC45HC | VVQLVQSGSDVRKPGATVTVSCKADEDEDDFTAYNYFMHWVRQ |
| | | APGHGLEWIGWINPRTGQPNHAKQFQGRVTLTRERSTSTVFMKL |
| | | TNLRLDDTAVYFCARPLRGGDTWHYHSWGRGTSLTVSSASTKG |
| 417 | 3BNC53HC | QVQLVQSGAALKKPGASVRISCQAYGYKFTDHLIYWWRQAPGQG |
| | | LEWIGWIKPETGQPSYAYKFQGRVTLTRDTFEEIHFMDLRGVRND |
| | | DTATYFCARRHSDYCDFDVWGSGSQVIVSSASTKG |
| 418 | 3BNC54HC | EVQLVESGSDVRKPGATVTVSCKADEDEDDFTAYNYFMHWVRQA |
| | | PGHGLEWIGWINPRTGQPNHAKQFQGRVTLTRERSTSTVFMKLT |
| | | NLRLDDTAVYFCARPLRGGDTWHYHSWGRGTSLTVSSASTKG |
| 419 | 3BNC55HC | QVQLVQSGTAVKRPGASVRVSCQASGYTFTDYFIYWWRQAPGQ |
| | | GLEWLGWINPLTSQPSYPSRFQGRLTLTRDTFDEMLYMDLRGLR |
| | | SDDTGIYFCARRHSDYCDFDIWGSGTQIIVSSASTKG |
| 420 | 3BNC59HC | EVQLVQSGSDVRKPGATVTVSCKADEDEDDFTAYNYFMHWVRQ |
| | | APGHGLEWIGWINPRTGQPNHAKQFQGRVTLTRERSTSTVFMKL |
| | | TNLRLDDTAVYFCARPLRGGDTWHYHSWGRGTSLTVSSASTKG |
| 421 | 3BNC60HC | QVHLSQSGAAVTKPGASVRVSCEASGYKISDHFIHWWRQAPGQG |
| | | LQWVGWINPKTGQPNNPRQFQGRVSLTRQASWDFDTYSFYMDL |
| | | KAVRSDDTAIYFCARQRSDFWDFDVWGSGTQVTVSSASTKG |
| 422 | 3BNC62HC | QVRLLQSGAAVTKPGASVRVSCEASGYEIRDYFIHWWRQAPGQG |
| | | LQWVGWINPKTGQPNNPRQFQGRVSLTRQASWDFDSYSFYMDL |
| | | KALRSDDTGVYFCARQRSDYWDFDVWGSGTQVTVSSASTKG |
| 423 | 3BNC64HC | QVHLSQSGAAVTKPGASVRVSCEASGYKISDHFIHWWRQAPGQG |
| | | LQWVGWINPKTGQPNNPRQFQGRVSLTRQASWDFDTYSFYMDL |
| | | KALRSDDTAIYFCARQRSDFWDFDVWGSGTQVTVSSASTKG |
| 424 | 3BNC65HC | QVQLLPFGGAVTKPGASVRVSCEASGYNIRDYFIHWWRQAPGQG |
| | | LQWVGWINPKTGQPNNPCQFQGRVSLTRPASWDFDTISFYMDLK |
| | | ALRLDDTAVYFCARQRSDYWDFDVWGSGTQVTVSSASTKG |
| 425 | 3BNC66HC | QVQLVQSGAALKKPGASLRISCQTYGYKFTDHLIYWWRQAPGQG |
| | | LEWIGWIKPETGQPSYSYRFQGRVSLTRDTFEEIAFMDLRGLRSD |
| | | DTAIYFCARRHTDYCVFDVWGSGSQIIVSSASTKG |
| 426 | 3BNC6HC | QVQLVESGSDVRKPGATVTVSCKADEDEDDFTAYNYFMHWVRQ |
| | | APGHGLEWIGWINPRTGQPNHAKQFQGRVTLTRERSTSTVFMKL |
| | | TNLRLDDTAVYFCARPLRGGDTWHYHSWGRGTSLTVSSASTKG |
| 427 | 3BNC72HC | QVQLVQSGAALKKPGASLRISCQTYGYKFTDHLIYWWRQAPGQG |
| | | LEWMGWIKPETGQPSYSYRFQGRVSLTRDTFEEIVFMDLRGLRS |
| | | DDTAIYFCARRHSDYCDFDVWGSGSQVIVSSASTKG |
| 428 | 3BNC75HC | QVQLLQSGAAVTKPGASVRVSCEASGYNIRDYFIHWWRQAPGQG |
| | | LQWVGWINPKTGQPNNPRQFQGRVSLTRHASWDFDTFSFYMDL |
| | | KALRSDDTAVYFCARQRSDYWDFDVWGSGTQVTVYSASTKG |
| 429 | 3BNC79HC | QVQLLQSGAAVTKPGASVRVSCEASGYNIRDYFIHWWRQAPGQG |
| | | LQWVGWINPKTGQPNNPRQFQGRVSLTRQASWDFDTISFYMDLK |
| | | ALRLDDTAVYFCARQRSDYWDFDVWGSGTQVTVSSASTKG |
| 430 | 3BNC81HC | RQVQLVQSGAALKKPGASLRISCQAYGYKFTDHLIYWWRQAPGQ |
| | | GLEWIGWIKPETGQPSYSYKFQGRVSLTRDTFQEILFMDLRGLRS |
| | | DDTAIYFCARRHSDYCDFDVWGSGSQILVSSASTKG |
| 431 | 3BNC84HC | QVQLVQSGAALKKPGASLRISCQAYGYKFTDHLIYWWRQAPGQG |
| | | LEWIGWIKPETGQPSYSYKFQGRVSLTRDTFQEILFMDLRGLRSD |
| | | DTAIYFCARRHSDYCDFDVWGSGSQVIVSSASTKG |
| 432 | 3BNC86HC | QVQLVQSGSDVRKPGATVTVSCKADEDEDDFTAYNYFMHWVRQ |
| | | APGHGLEWIGWINPRTGQPNHAKQFQGRVTLTRERSTSTVFMKL |
| | | TNLRLDDTAVYFCARPLRGGDTWHYHSWGRGTSLTVSSASTKG |
| 433 | 3BNC87HC | QVQLLQSGAAVTKPGASVRVSCEASGYNIRDYFIHWWRQAPGQG |
| | | LQWVGWINPKTGQPNNPRQFQGRVSLTRHASWDFDTFSFYMDL |
| | | KALRSDDTAVYFCARQRSDYWDFDVWGSGTQVTVSSASTKG |
| 434 | 3BNC89HC | QVQLVQSGTAVKRPGASVRVSCQASGYTFIDHFIYWWRQAPGQG |
| | | LEWLGWINPLTSQPSYPSRFQGRLTLTRDTFDEMLYMDLRGLRSD |
| | | DTGIYFCARRHSDYCDFDIWGSGTQIIVSSASTKG |
| 435 | 3BNC91HC | QVQLLQSGAVVTKPGASVRVSCEASGYKIRDYFIHWWRQAPGQG |
| | | LQWVGWINPQTGQPNIPRPFQGRVTLTRHASWDFDTFSFYMDLK |
| | | ALRSDDTAIYFCARRRSDYCDFDVWGSGTHVTVSSASTKG |
| 436 | 3BNC92HC | EVQLVQSGSDVRKPGATVTVSCKADEDEDDFTAYNYFMHWVRQ |
| | | APGHGLEWIGWINPRTGQPNHAKQFQGRVTLTRERSTSTVFMKL |
| | | TNLRLDDTAVYFCARPLRGGDTWHYHSWGRGTSLTVSSASTKG |
| 437 | 3BNC94HC | QVQLVQSGSDVRKPGATVTVSCKADEDEDDFTAYNYFMHWVRQ |
| | | APGHGLEWIGWINPRTGQPNHAKQFQGRVTLTRERSTSTVFMKL |
| | | TNLRLDDTAVYFCARPLRGGDTWHYHSWGRGTSLTVSSASTKG |
| 438 | 3BNC95HC | QVQLLQSGAAVTKPGASVRVSCEASGYNIRDYFIHWWRQAPGQG |
| | | LQWVGWINPKTGQPNNPRLFQGRVSLTRHASWDFDTFSFYMDLK |
| | | AVRSDDTAVYFCARQRSDYWDFDVWGSGTQVTVSSASTKG |

TABLE B

| Seq ID | | |
|---|---|---|
| No. | Antibody | Light Chain Amino Acid Sequence |
| 439 | 8ANC131KC | EIVLTQSPATLSLSPGERATLSCRASQGLNFVVWYQQKRGQAPR |
| | | LLIHAPSGRAPGVPDRFSARGSGTEFSLVISSVEPDDFAIYYCQEY |
| | | SSTPYNFGPGTRVDRKRTVAAPSVFIFPPSDEQ |
| 440 | 8ANC134KC | EIVLTQSPATLSLSPGERATLSCRASQGLNFVVWYQQKGGQAPR |
| | | LLIHGPTDRAPGVPDRFSARGSGTEFSLVISSVEPDDFALYYCQE |
| | | YSSTPYNFGPGTRVDRKRTVAAPSVFIFPPSDEQ |
| 441 | 8ANC13KC | EIVLTQSPATLSLSPGERATLSCRASQGLNFVVWYQQKRGQAPR |
| | | LLIHGPSHRAPGVPDRFSARGSGTEFSLVISSVEPDDFAIYYCQE |
| | | YSSTPYNFGPGTRVDRKRTVAAPSVFIFPPSDEQ |
| 442 | 8ANC45KC | EIVLTQSPATLSLSPGERATLSCRASQGVNFVVWYQQKRGQAPR |
| | | LLIYGPSNRAPGVPDRFSARGSGTEFSLVISSVEPDDFALYYCQE |
| | | YSSTPYNFGPGTRVDRKRTVAAPSVFIFPPSDEQ |
| 443 | 8ANC50KC | EIVLTQSPTTLSLSPGERATLSCRASQGVNLVVWYQQKRGQAPR |
| | | LLIYGPSDRAPGVPDRFSARGSGTEFSLVISSVEPDDFALYYCQE |
| | | YSSTPYNFGTGTRVDRKRTVAAPSVFIFPPSDEQ |
| 444 | 8ANC88KC | EIVLTQSPATLSLSPGERATLSCRASQGLNFVVWYQQKRGQAPR |
| | | LLIHAPSDRAPGVPDRFSARGSGTDFSLVISSVEPDDFAIYYCQEY |
| | | SSTPYNFGPGTRVDRKRTVAAPSVFIFPPSDEQ |
| 445 | 8anc182kc | EIVLTQSPATLSLSPGERATLSCRASQGVNFVVWYQQKRGQAPR |
| | | LLIYGPSDRAPGVPDRFSARGSGTEFSLVISSVEPDDFALYYCQE |
| | | YSSTPYNFGTGTRVDRKRTVAAP |
| 446 | 8anc192kc | EIVLTQSPATLSLSPGERATLSCRASQGVNFVVWYQQKRGQAPR |
| | | LLIYGNSDRVPGVPDRFSARGSGTEFSLVISSVEPDDFALYYCQE |
| | | YSSTPYNFGPGTRVDRKRTVAA |
| 447 | 8ANC14KC | SEIVLTQSPATLSLSPGERATLSCRASQSINNYLAWYQQKPGQAP |
| | | RLLIYDASNRATGIPARFSGGGSGTDFTLTISSLEPEDFAVYYCQQ |
| | | RANWRLLTFGGGTKVEIKRTVAAPSVFIFPPSDEQ |
| 448 | 8ANC16KC | EIVMTQSPDTLSVSPGERATLSCRASQSVNSNLAWYQQKPGQA |
| | | PRLLIYGASTRATAVPARFSGSGSGTEFTLTISSLQSEDSAVYYC |
| | | QQYYQWLSYTFGQGTKLEIKRTVAAPSVFIFPPSDEQ |
| 449 | 8ANC195KC | DIQMTQSPSTLAASIGGTVRVSCRASQSITGNWVAWYQQRPGKA |
| | | PRLLIYRGAALLGGVPSRFSGSAAGTDFTLTIGNLQAEDFGTFYC |
| | | QQYDTYPGTFGQGTKVEVKRTVAAPSVFIFPPSDEQ |
| 450 | 8ANC24KC | SEIVMTQSPATLSMSPGERATLSCRASLSVNTNLAWYQQKPGQA |
| | | PRLLIYGASTRATGIPARFSGSGSGTEFTLTISSLQSEDFALYYCQ |
| | | QYNHWPQTFGQGTKVEIKRTVAAPSVFIFPPSDEQK |
| 451 | 8ANC5KC | DIQMTQSPPSLSASVGDRVTITCQASQDINNFLNWYQQKPGKAP |
| | | RLLIYDASNLESGVSSRFSGSRSGTDFTLTISSLLPEDIATYSCQQ |
| | | YSNLPYTFSQGTKLEIKRTVAAPSVFIFPPSDEQ |
| 452 | 12a12kc | DIQMTQSPSSLSASVGDRVTITCQAGQGIGSSLQWYQQKPGKAP |
| | | KLLVHGASNLHRGVPSRFSGSGFHTTFSLTISGLQRDDFATYFCA |
| | | VLEFFGPGTKVEIKRTVAAPSVFIFPPSDEQLKS |
| 453 | 12a13kc | DIQMTQSPSSLSASVGDRVTITCQAGQGIGSSLQWYQQKPGKAP |
| | | KLLVHGASNLHRGVPSRFSGSGFHTTFSLTISGLQRDDFATYFCA |
| | | VVEFFGPGTKVDIKRTVAAPSVFIFPPSDEQL |
| 454 | 12a16kc | DIQMTQSPSSLSASVGDRVTITCQASQGIGSSLQWYQQKPGRAP |
| | | NLLVHGASKLHRGVPSRFSGSGFHTTFSLTISGLQRDDFATYFCA |
| | | VLEFFGPGTKVEIKRTVAAPSVFIFPPSDEQLK |
| 455 | 12a1kc | DIQMTQSPSSLSASVGDRVSINCQAGQGLGSSLNWYQQKPGRA |
| | | PKLLVHGASNLQRGVPSRFSGSGFHTTFTLTISSLQPDDVATYFC |
| | | AAFQWFGPGTKVEIKRT |
| 456 | 12a20kc | DIQMTQSPSSLSASVGDRVSIHCQAGQGIGSSLNWYQQKPGRAP |
| | | RLLVHGASNLQRGVPSRFSGSGFHTTFTLTISSLQPDDVATYWC |
| | | AALEFFGPGTKVEI |
| 457 | 12a21kc | DIQMTQSPSSLSASVGDRVTINCQAGQGIGSSLNWYQKKPGRAP |
| | | KLLVHGASNLQRGVPSRFSGSGFHTTFTLTISSLQPDDVATYFCA |
| | | VFQWFGPGTKVDIKRTVAAPSVFIFPPSDEQLK |
| 458 | 12a22kc | DIQMTQSPSSLSASVGDRVTITCQAGQGIGSSLNWYQQKPGRAP |
| | | KLLVYGASNLQRGVPSRFSGSGFHTTFTLTISSLQPEDFATYFCS |
| | | VYEFLGPGTKVEIKRTVAAPSVFIFPPSDEQ |
| 459 | 12a23kc | DIQMTQSPSSLSVSVGDRVSITCRATQGIGNSLNWYQQKPGKAP |
| | | KVLIYGTTKLHGGVPSRFSGGGSGSTGTLTIDSLQPEDIATYFCQL |
| | | FEFFGPGTKVEIKRTVAAPSVFIFPPSDEQ |
| 460 | 12a27kc | DIQMTQSPSSLSASVGDRVTITCQASQGIGSSLQWYQQKPGRAP |
| | | NLLVHGASNLHRGVPSRFSGSGFHTTFSLTISGLQRDDFATYFCA |
| | | VLEFFGPGTKVDIKRTVAAPSVFIFPPSDEQ |
| 461 | 12a46kc | DIQMTQSPSSLPASVGDTVTITCQAGQGIGSSLQWYQQRPGRAP |
| | | NLLVYDASNLQRGVPSRFTGTGFHTTFTLTIRGLRPEDFGTYFCA |
| | | SLEFFGPGTKVDIKRTVAAPSVFIFPPSDEQ |
| 462 | 12a55kc | YIQMTQSPSSLSASIGDRVTITCQAGQGIGSSLNWYQQKPGKAPK |
| | | LLVHGASNLQRGVSSRFSGSGFHTTFTLTISSLRPEDVGTYFCEV |
| | | YEFIGPGTKVDIKRTVAAPSVFIFPPSDEQ |
| 463 | 12a56kc | DIQMTQSPSSLSASVGDRVSINCQAGQGIGSSLNWYQQKRGKAP |
| | | KLLVHGASTLQRGVPSRFSGSGFHTTFTLTISSLQPDDVATYFCE |
| | | SFQWFGPGTKVEIKRTVAAPSVFIFPPSDEQ |
| 464 | 12a6kc | DIQMTQSPSSLSASVGDRVTITCQASQGIGSSLQWYQQKPGRAP |
| | | KLLVHGASNLHRGVPSRFSGSGFHTSFTLTISSLQPDDVATYFCA |
| | | VLEFFGPGTKVEIKRTVAAPSVFIFPPSDEQ |
| 465 | 12a7kc | DIQMTQSPSSLSASVGDRVSIHCQAGQGIGSSLKWYQQKSGRAP |
| | | RLLVHGASNLQRGVPSRFSGSGFHTTFTLTISSLQPDDVATYWC |
| | | AVLEFFGPGTKVEIKRTVAAPSVFIFPPSDEQ |
| 466 | LSSB2339LC | QSVLTQPPSASGAPGQRVTISCSGGPSNVGGNYVYWYRQFPGT |
| | | APNLLILRDDQRPSGVPDRFSASKSGNSASLAISGLRPDDEAFYF |
| | | CATYDSDGSVRLFGGGTTLTVLSQPKAAPSVTLFPPSNGGR |
| 467 | LSSB2351LC | QSALTQTPSVSGAPGQRVTISCSGGPSNVGGNYVYWYQQFPGA |
| | | APKLLIRRDDQRPSGVPDRFSGSKSGNSASLAISGLRLDDEAYYF |
| | | CATYDSGWSIRLFGGGTRLTVLSQPKAAPSVTLFPPSSEEL |
| 468 | LSSB2364LC | SQAVVTQPPSVSGAPGQRVTISCSGGPSNVGGNLVYWYKQFPG |
| | | TAPKLLIRRDDQRPSGVPDRFSGSKSGNSASLAISGLRPDDEAFY |
| | | FCATYDSHGSIRLFGGGTLLTVLSQPKAAPSVTLFPP |
| 469 | LSSB2367LC | QTVVTQPPSASGTPGQRVTISCSGGGSNIGGNLVSWYQHFPGA |
| | | APKLLIYRNDQRPSGVPDRFSGSKSGTSASLTISGLRSDDEATYF |
| | | CAAYDCTLSLRLFGGGTTLNVLSQPKAAPSVTLFPPSSEEL |
| 470 | LSSB2490LC | QSALTQPPSVSGTPGQNVTISCSGGGSNVGGNLVSWYQHFPGA |
| | | APKLLIHRDNQRPSGVPDRFSVLKSGNSASLAISGPRSDDEAFYF |
| | | CAVYDSSLSLGLFGGGTKLTVLSQPKAAPSVTLFPPSSEEL |
| 471 | LSSB2530LC | QSALTQPPSASGAPGQRVTISCSGGPSNVGGNYVYWYRQFPGT |
| | | APTLLILRDDQRPSGVPDRFSASKSGNSASLAISGLRPDDEGFYF |
| | | CATYDSDGSIRLFGGGTALTVLSQPKAAPSVTLFPPSSEELK |
| 472 | LSSB2554LC | NFMLTQAPSASGAPGQRVTISCSGGPSNVGGNYVYWYRQYPGT |
| | | APKLLILRDDQRPSGVPDRFSASKSGNSASLAISELRPDDEAFYF |
| | | CATYDSDGSIRLFGGGTALTVLSQPKAAPSV |
| 473 | LSSB2586LC | NFMLTQPPSASGAPGQRVTISCSGGPSNVGGNYVYWYRQFPGT |
| | | APNLLILRDDQRPSGVPDRFSASKSGNSASLAISGLRPDDEAFYF |
| | | CATYDSDGSIRLFGGGTTLTVLSQPKAAPSVTLFPP |
| 474 | LSSB2612LC | QSVLTQPPSASGAPGQRVTISCSGGPSNVGGNYVYWYRQFPGT |
| | | APKLLILRDDQRPSGVPDRFSASKSGNSASLAISGLRPDDEAFYF |
| | | CATYDSDGSIRLFGGGTALTVLSQPKAAPS |
| 475 | LSSB2640LC | QLVLTQPPSVSGTPGQNVTISCSGGGSHVGGNLVSWYQHFPGA |
| | | APKLLIHRDNQRPSGVPDRFSALKSGNSASLAISGLRSDDEAFYF |
| | | CAVYDSSLSLGLFGGGTKLTVLSQPKAAPSVT |
| 476 | LSSB2644LC | RTVVTQPPSVSGAPGQRVTISCTGSSSNIGAGYDVHWYQQLPGT |
| | | APKLLIYGNSNRPSGVPDRFSGSKSGTSASLAITGLQAEDEADYY |
| | | CQSYDSSLSGSGVFGTGTKVTVLGQPKANPTVTLFPPSSEEL |
| 477 | LSSB2666LC | QSALTQPPSASGAPGQRVTISCSGGPSNVGGNYVYWYRQFPGT |
| | | APKLLILRDDQRPSGVPDRFSASKSGNSASLAISGLRPDDEALYF |
| | | CATYDSDGSIRLFGGGTALTVLSQPKAAPSVTLFPPGWEE |
| 478 | LSSB2680LC | QPVLTQPPSASGAPGQRVTISCSGGPSNVGGNYVYWYRQFPGT |
| | | APNLLILRDDQRPSGVPDRFSASKSGNSASLAITGLRPDDEAFYF |
| | | CATYDSDGSIRLFGGGTALTVLSQPKAAPSVTLFPP |
| 479 | LSSB2683LC | QSALTQPPSASGAPGQRVTISCSGGPSNVGGNYVYWYRQFPGT |
| | | APNLLILRDDQRPSGVPDRFSASKSGNSASLAISGLRPDDEAFYF |
| | | CATYDSDGSIRLFGGGTTLTVLSQPKAAPSVTLF |
| 480 | LSSB344LC | QSALTQTPSVSGAPGQRVTISCSGGPSNVGGNYVYWYQQFPGA |
| | | APKLLIRRDDQRPSGVPDRFSGSKSGNSASLAISGLRLDDEAYYF |
| | | CATYDSGWSIRLFGGGTRLTVLSQPKAAPSVTLFPPSSEEL |
| 481 | LSSNEC107LC | QLVLTQPPSVSATPGQTVTISCSGSGSNVGGNHVYWYRQLPGA |
| | | APTLVISKTDHRPSRVPDRFSGSKSGNSASLAISGLRPDDEAAYF |
| | | CATYDTGLSLRLFGGGTRLAVLSQPKAAPSVTLFPPSSEEL |
| 482 | LSSNEC108LC | QSALTQPPATSGTPGQRVTISCSGGGSNVGGNLVSWYQQFPGA |
| | | APKLILHRDGQRPSGVPDRFSASKSGTSASLTISGLRSDDEATYF |
| | | CAAFDSALSLPLFGGGTKLTVLSQPKAAPSVTLFPPSSEEL |
| 483 | LSSNEC117LC | QSVLTQVLSVSGTPGQRVIISCSGTSSNVGGNLVSWYQHLPGAA |
| | | PRLLIHRDDQRPSGVPDRFSGSKSGNSASLVISGLRSDDEADYF |
| | | CGAYDSTFSLPVFGGGTRLTVLSQPKAAPSVTLFPPSSEEL |
| 484 | LSSNEC118LC | NFMLTQPPSVSATPGQTVTISCSGSGSNVGGNHVYWYRQLPGA |
| | | APTLVISKTDHRPSRVPDRFSGSKSGNSASLAISGLRPDDEAVYF |
| | | CATYDTGLSLRLFGGGTRLTVLSQPKAAPSVTQFPPSSEE |
| 485 | LSSNEC122LC | QSALTQPPSVSATPGQTVTISCSGSGSNVGGNHVYWYRQLPGA |
| | | APTLLISKTNHRPSQVPDRFSASKSGNSASLAISGLRPDDEADYF |
| | | CGTYDTSLSLRLFGGGTRLTVLSQPKAAPSVTLFPPSSEEL |
| 486 | LSSNEC24LC | QSALTQPPSASGTPGQRVTISCSGGGSNIGGNLVSWYQHFPGTA |
| | | PKLLIYRNDQRPSGVPDRFSGSKSGTSASLTISGLRSDDEATYFC |
| | | AAYDSSLSLRLFGGGTTLNVLSQPKAAPSVTLFPPSSEEL |
| 487 | LSSNEC2LC | QSALTQPPSVSGTPGQNVTISCSGGGSDVGGNLVSWYQHFPGA |
| | | APKLLIHRDNQRPSGVPDRFSALKSGNSASLAISGLRSDDEAFYF |
| | | CAVYDSSLSLGLFGGGTKLTVLSQPKAAPSVTLFPPSSEEL |
| 488 | LSSNEC33LC | QAVVTQPPSVSATPGQTVTISCSGSGSNVGGNHVYWYRQLPGA |
| | | APTLLISKTNRRPSQVPDRFSGSKSGNSASLAISGLRPDDEADYF |
| | | CATYDTDLSLRLFGGGTRLTVLSQPKAAPSVTLFPPSSEEL |
| 489 | LSSNEC46LC | QSALTQPPAASGAPGQRVTISCSGGGSNVGGNLVSWYQQFPGA |
| | | APKLILHRDGQRPSGVPDRFSASKSGTSASLTISGLRSDDEATYF |
| | | CAAYDSAVSLPVFGGGTKLTVLSQPKAAPLVT |
| 490 | LSSNEC48LC | NFMLTQPPSASGTPGQRVTISCSGGGSNIGGNLVSWYQHFPGA |
| | | APKLLIYRNDQRPSGVPDRFSGSKSGTSASLAISGLRSDDKATYF |
| | | CAAYDSTLSLRLFGGGTTLTVLSQPKAAPSVTLFPPSSEE |
| 491 | LSSNEC52LC | QSVLTQVLSVSGTPGQRVIISCSGTSSNVGGNLVSWYQHLPGAA |
| | | PRLLIHRDDQRPSGVPDRFSGSKSGNSASLVISGLRSDDEADYF |
| | | CAAYDSTFSLPVFGGGTRLTVLSQPKAAPSVTLFPPSSE |
| 492 | LSSNEC56LC | QSALTQPPSVSATPGQTVTISCSGSGSNVGGNHVYWYRQLPGA |
| | | APTLLISKTDHRPSRVPDRFSASKSGNSASLAISGLRPDDEAIYFC |
| | | ATYDTGLSLRLFGGGTRLTVLSQPKAAPSVTLFPPSSEEL |
| 493 | LSSNEC60LC | QSALTRTPSVSGAPGQRVTISCSGGPSNVGGNYVYWYQQFPGA |
| | | APKLLIRRDDQRPSGVPDRFSGSKSGNSASLAISGLRLDDEAYYF |
| | | CATYDSGWSIRLFGGGTRLTVLSQPKAAPSVTLFPPSSEEL |
| 494 | LSSNEC70LC | QSALTQAPSASGTPGQRVTISCSGGGSNIGGNLVSWYQHFPGA |
| | | APKLLIYRNDQRPSGVPDRFSASKSGTSASLAISGLRSDDEATYF |
| | | CAAYDSTLSLRLFGGGTTLAVLSQPKA |
| 495 | LSSNEC72LC | NFMLTQPPSVSGAPGQRVTISCSGGPSNVGGNLVYWYKQFPGT |
| | | APKLLIRRDDQRPSGVPDRFSGSKSGNSASLAISGLRPDDEAFYF |
| | | CATYDSHGSIRLFGGGTLLTVLSQPKAAPSVTLFPPSSEEL |
| 496 | LSSNEC7LC | QLVLTQPPSVSGAPGQRVTISCSGGPSNVGGNLVYWYKQFPGT |
| | | APKLLIRRDDQRPSGVPDRFSGSKSGNSASLTISGLRPDDEAFYF |
| | | CATYDSQGSTRLFGGGTVLTVLSQPKAAPSVTLFPPSSEEL |
| 497 | LSSNEC89LC | QSALTQPPSVSGAPGQRVTISCSGGPSNVGGNYVYWYRQFPGT |
| | | APKLLILRDDQRPSGVPDRFSASKSGNSASLAISGLRPDDEAFYF |
| | | CATYDSQGSFRVFGGGTALTVLSQPKAAPSVTLYPPSSEE |
| 498 | LSSNEC94LC | NFMLTQPPSASGAPGQRVTISCSGGPSNVGGNYVYWYRQFPGT |
| | | APNLLILRDDQRPSGVPDRFSASKSGNSASLAISGLRPDDEAFYF |
| | | CATYDSDGSIRLFGGGTTLTVLSQPKAAPSVTLFPPSSEEL |
| 499 | LSSNEC9LC | QVLSVSGTPGQRVIISCSGTSSNVGGNLVSWYQHLPGAAPRLLIH |
| | | RDDQRPSGVPDRFSGSKSGNSASLVISGLRSDDEADYFCAAYDS |
| | | TFSLPVFGGGTRLTVLSQPKAAPSVTLYAPSSEE |
| 500 | LSSB2066KC | PVTLSASVGDRVTITCRASEDISKYLNWYQHKPGKAPKLLIYTASS |
| | | LETGVPSRFSGSGSGTDFSLTISSLQPDDFATYYCQQSYTSSVTF |
| | | GQGTRVEVKRTVAAPSVFIFPPSDEQ |
| 501 | LSSB2080KC | PATLAVSPGERATISCKSSQNLLYSANNQHSLAWYQQRPGQPPK |
| | | LLLYWASTRLSGVPDRFSGSGSGTDFTLTISNLQAEDVAVYYCQ |
| | | QYYSPPPTFGQGTKVEIRRTVAAPSVFIFPPSDEQL |
| 502 | LSSB2133KC | TLSASVGDRVTITCRASQSINNYLNWYQQKPGKAPKLLIYAASSL |
| | | QSGVPSRFSGSGSGTDFTLTISSLQPEDFVTYYCQQTYSNPRMF |
| | | GQGTKVEIKRTVAAPSVFIFPPSDEQ |
| 503 | LSSB2182KC | KAPATLSLSPGERATLSCRASQSVGSDLAWYQQKPGQAPRLLIY |
| | | DASNRATAIPARFSGSGSGTDFTLSISSLEPEDFAVYFCQQRYDKI |
| | | TFGQGTRLEIQRTVAAPSVFIFPPSDEQ |
| 504 | LSSB331KC | RGPVTLAVSLGERATITCKSSQSVLVHSNNKNYLSWYQQKPGQP |
| | | PKLLIYWASTRESGVPERFSGSGSGTDFTLSISSLQAEDVAVYYC |
| | | HQYFSTPRTFGQGTKVEIKGTVAAPSVFIFPPSDEQL |
| 505 | 3A124KC | SEIVLTQSPATLSLSPGESATLSCRASQSLSSSLAWYQQKPGQAP |
| | | RLLIYDTSDRATGIPARFSGRGSGTDFTLTISSLEPEDFAVYYCQQ |
| | | RSNWAITFGQGTRLEIKRTVAAPSVFIFPPSD |
| 506 | 3A125KC | EIVLTQSPGTLSLSPGEXATLSCRASQTISNNYLXWYQQKAGQAP |
| | | RLLIYGASSGATGIPDRFSGSGSGTDFTLTISRLEPEDFAVYYCQQ |
| | | YGLSPWTFGRGTKVEIKRTVAAPSVFIFPPSD |
| 507 | 3A140LC | QSALTQPRSVSGSPGQSVTISCTGTSSDVGAYNYVSWYRQHPG |
| | | KAPKLMINDVSKRPSGVPDRFSGSKSGNTASLTISGLQAEDEADY |
| | | YCCSYAGTYSYVFGTGTKVTVLGQPKANPTVTLFPPSSEEL |
| 508 | 3A144KC | APVTLSASVGDTVTITCRASQPIATFLNWYQHKPGQAPKLLIYAAS |
| | | TFQRGAPSRYSGSGSGTDFTLTINSLQPEDLATYYCQQTFTDPVT |
| | | FGQGTRLEIKRTVAAPSVFIFPPSD |
| 509 | 3A160KC | DIQMTQSPASLSASVGDRVTITCRASQGISHYLAWYQQKPGKVP |
| | | RLLIYAASRLQSGVTSRFSGSGSGTEFTLTISSLLPEDAAVYFCQK |
| | | YDTDPMTFGQGTRLEIKRTVAAPSVFIFPPSD |
| 510 | 3A18KC | DIQMTQSPSSLSASIGDRVTITCRANQHIRSFLNWYQQTPGKAPK |
| | | LLIYAASTLQRGVPSRFSGSGSGTDFTLTITSLEREDLATYYCQQT |
| | | YTSPITFGQGTRLEIKRTVAAPSVFIFPPSDE |
| 511 | 3A204KC | EIVLTQSPGTLSLSPGERATLSCRASQSVSNNYLAWYQQKPGQA |
| | | PRLLIYGASSRATGIPDRFSGSGSGTDFTLTISRLEPEDFAVYYCQ |
| | | QYATSSLYTFGQGTKLEIKRTVAAPSVFIFPPSD |
| 512 | 3A228KC | LSVSLGERATINCKSSQSILYSSDKKNYLAWYQQKIGQPPKLLLY |
| | | WASTRESGIPDRFSGSGSGSDFTLTISSLQPEDVAVYYCQQYYIS |
| | | PFTFGPGTKVDLKRTVAAPSVFIFPPSD |
| 513 | 3A233LC | NFMLTQPASVSGSPGQSITLSCTGTTSDVRDSNFVSWYQQVPG |
| | | KAPKLIIYDVSARPSGVSFRFSGSKSGNTASLTISGLQAEDEALYY |
| | | CSSFTPTNTLVFGGGTKLTVLGQPKAAPSVT |
| 514 | 3A244LC | SQSVVTQEPSLTVSPGGTVTLTCGPSTGAVTSGFYPHWFQQKP |
| | | GQAPRALIYSTSNKYSWTPARFSGSLLGGKAVLTLSDVQPDDEA |
| | | EYYCLLLLYYGGPWIFGGGTKLTVLVS |
| 515 | 3A255LC | QAVVTQEPSLTVSPGGTVTLTCASSTGAVTSGFYPHWFQQKPG |
| | | QAPRALIYSTSNRYSWTPARFSGSLLGGKAALTLSGVQPEDEAE |
| | | YYCLLLPYYGGPWIFGGGTKLTVLGQPKAAPSVTLFPPSSEEL |
| 516 | 3A296KC | EIVMTQSPATLSVSPGDRATLSCRASQSVSTNLAWYQQKPGQAP |
| | | RLLIYGASTRATGIPATFSGSGFATEFTLTISSLQSEDFAVYYCQQ |
| | | YNNWPPAFGQGTKVEIKRTVAAPSVFIFPPSD |
| 517 | 3A334LC | QSVLTQPPSASGSPGQSITISCTGTSSDVGGYNYVSWYQQPPGK |
| | | APKVIIYEVSKRPSGVPDRFSGSKSGNTASLTVSGLQAEDEADYY |
| | | CSSYAGSNNFVFGTGTEVTVVGQPKANPTVTLFPPSSEELL |
| 518 | 3A366KC | SLSASVGDRVTITCRASESISFYLNWYQQKPGKAPELLIFATSTLH |
| | | SGVPSRFSGSGSGTDFTLTISSLQLEDFATYYCQQSSSTPFTFGG |
| | | GTKVEIKRTVAAPSVFIFPPSD |
| 519 | 3A384KC | DIQMTQSPSSLSAYVGDRVTITCRASQNINTYLNWYQQRPGKAP |
| | | KLLIYAASTLQSGVPSRFSGSGSGTDFTLTISNLETEDFAVYYCQQ |
| | | TYRSVTFGQGTKLEIKRTVAAPSVFIFPPSD |
| 520 | 3A419KC | LSAYVGDRVTITCRASQNINTYLNWYQQRPGKAPKLLIYAASTLQ |
| | | SGVPSRFSGSGSGTDFTLTISNLETEDFAVYYCQQTYSSVTFGQ |
| | | GTKLETRRTVAAPSVFIFPPSD |
| 521 | 3A461KC | SEIVLTQSPGTLSLSPGERATLSCRASQSVSSSYLAWYQQKPVQ |
| | | APRLLIYGASSRATGIPDRFSGSGSGTDFTLTISRLEPEDFAVYYC |
| | | QQYGTLHPRTFGQGTKVEIKRTVAAPSVFIFPPSD |
| 522 | 3A474KC | EIVLTQSPGTLSLSPGERATLSCRASQSISSNYLAWYQQKPGQAP |
| | | RLLIYGASTRATGIPDRFSGSGSGTDFTLSISRLEPEDIAVYYCHQ |
| | | YGSSQRFGQGTKVEIKRTVAAPSVFIFPPSD |
| 523 | 3A518KC | DIQMTQSPSSLSASVGDRVTITCRASQSISRYLNWYQQKPGKAP |
| | | KLLIYAASSLQGGVPSRFSGSGSGTDFTLTISSLQPEDFATYYCQ |
| | | QSSSKPFTFGGGTKVEIKRTVAAPSVFIFPPSD |
| 524 | 3A539LC | NFMLTQPASVSGSPGQSITISCSGTGSDIGVYNYVSWYQQHPGK |
| | | APRLMIYDVTNRPSGVSNRFSGSKSGFTASLTISGLQGDDEADYY |
| | | CSSYSSTNTYVFGTGTHVTVLGQPKANPTVTLFPPSSEEL |
| 525 | 3A576LC | QSALTQPPSASGTPGQRVTISCSGSYHNIGSNAVNWYQQLPGTA |
| | | PKLLIYSNDQRPSGVPDRFSGSKSGTSASLAISGLQSEDEADYYC |
| | | AAWDDSLHVFGTGTKVTVLGQPKANPTVTLFPPSSEEL |
| 526 | 3A613LC | QSALTQPPSASGTPGQRVTISCSGSYHNIGSNAVNWYQQLPGTA |
| | | PKLLIYSNDQRPSGVPDRFSGSKSGTSASLAISGLQSEDEADYYC |
| | | AAWDDSLHVFGTGTKVTVLGQPKANPTVTLFPPSSEEL |
| 527 | 3A64KC | DIQMTQSPSSLSASVGDRVTITCRASQDITTYLAWLQQKPGKAPK |
| | | SLIYSASTVQSGVPSRFSGSGSGTEFTLTISGLQPEDFATYYCQQ |
| | | YNYYPITFGLGTRLEIKRTVAAPSVFIFPPSDE |
| 528 | 3A650KC | IILFLVATATGSWAQSALTQPRSVSGSLGQSVTISCTGSSSDVGR |
| | | YNYVSWYQHHPGKAPKLMISDVNKRPSGVPDRFSGSKSGNTAS |
| | | LTISGLQAEDETDYYCCSYAGSYIWVFGG |
| 529 | 3A67KC | EIVLTQSPATLSLSPGERATLSCRASQSVSSYLAWYQQKPGQAP |
| | | RLLIYDASNRATGIPARFSGSGSDTDFTLTISSLEPEDFAVYYCQQ |
| | | RGIWPLQITFGQGTRLEIKRTVAAPSVFIFPPSDE |
| 530 | 3A779KC | LSASVGDRVTITCRASQSIDRYLNWYQQKPGKAPKLLIYAASSLH |
| | | TDVPSRFSGSGAGTYFTLTITSLQPEDFATYYCQQSHSPSFGQE |
| | | SYSITFGQGTRLEIKRTVAAPSVFIFPPSD |
| 531 | 3A816KC | VTLSLSPGERATLSCRASQTISNNYLAWYQQKPGQAPRLLIYGAS |
| | | SGATGLPDRFSGSGSGTDFTLTISRLEPEDFAVYYCHQYALSPW |
| | | TFGRGTKVEIKRTVAAPSVFIFPPSD |
| 532 | 3A869KC | IILFLVATATGVHSDIQMTQSPSSLSASVGDRVTITCRASQSIDRYL |
| | | NWYQHKPGKAPKLLIYAASNLHTDVPSRFSGSGAGTYFTLTITSL |
| | | QPEDFATYYCQQSHSPSFGQESYSIAFGQGTRLEIKRTVAAPSVF |
| | | IFPPSDE |
| 533 | 3A93LC | QSVLTQPASVSGSPGQSITISCTGTNSDVGYSYVSWFQQHPGKV |
| | | PKLLIYDVSRRSSGVSNRFSGSRSGNTASLTISGLRAEDEADYYC |
| | | GSFTTSLTLVFGGGTKLAVLVSPS |
| 534 | 3a426kc | EIVLTQSPGTLSLSPGERATLSCRASQSVSSRYLAWYQQKPGQA |
| | | PRLIIYDASSRASGIPDRFSGSGSETDFTLTITRLEPEDFAVYYCQL |
| | | YGTSPKFTFGQGTKLEIKRTVAAPSVFIFPPSD |
| 535 | 3a515kc | DVVMTQSPLSLPVTLGQPASISCRSSQSLVYSHGDTYLKCFQQR |
| | | PGQSPRRPIYKVSNRDSGVPDRFSGSGSGTDFTLKISRVEAEDV |
| | | GV |
| 536 | 3b129kc | GPATLSVSPGERATLSCRASQSLRNNLAWYQQKTGQSPRLLIYA |
| | | VSTRATGIPPRFSGGGSGTEFTLTIDSLQSEDFAVYFCQQYDSPQ |
| | | WTFGQGTKVEIKRTVAAPSVFIFPPSD |
| 537 | 3b171lc | QSVLTQPASVSGSPGQSITISCTGTSNDVGGQNFVSWYQQHPG |
| | | TAPQLLIYDVTNRPAGVSSRFSGSKSGNTASLTISGLRTEDEADY |
| | | YCASFTILNGVDYVFGTGTKVTVLLSPSQPYL |
| 538 | 3b27kc | EIVLTQSPATLSVSPGERATLSCRAGQSVSSDLAWYQHKPGQAP |
| | | RLLIYDASKRATGIPARFSGSGSGTDFTLTISSLEPEDFAVYYCQH |
| | | RTNWPPSITFGQGTRLEIKRTVAAPSVFIFPPSD |
| 539 | 3b41kc | EIVLTQSPGTLSLSPGERATLSCRASQSVSSNYLAWYQQKPGQA |
| | | PRLLIYGASSRATGIPDRFSGSGSGTDFTLSISRLEPEDFAVYYCQ |
| | | QYGTSSCTFGQGTKLEIKRTVAAPSVFIF |
| 540 | 3b5kc | EIVLTQSPGTLSLSPGDRAALSCRASETLSGNSLAWYQQKRGQP |
| | | PRLLIFAASSRATGIPERFSGGGSGTDFTLTITRLEPEDFAVYFCQ |
| | | QYVDAPITFGQGTRLEIKRTVAAPSVFIFPPSD |
| 541 | 3b46kc | EIVLTQSPGTLSLSPGERATLSCRASQSVSSNNLAWYQQKPGQA |
| | | PRLLMSGASSRATGIPDRFSGSGSGTDFTLTISRLEPEDFAVYHC |
| | | QQYGSSPPTFGQGTKVEIKRTVAAPSVFIFPP |
| 542 | 3b57lc | QSVLTQPRSVSGSPGQSVTISCTGTSSDVGGYNYVSWYQQHPG |
| | | KAPKTMIFDVTKRPSGVPDRFSGSKSGNTASLTISGLQAEDEADY |
| | | YCSSYAGRNTFYVFGTGTTVTVQVSPSQPPP |
| 543 | 3b8kc | EIVLTQSPGTLSLSPGERATLSCRASQSVSSNLAWYAQKPGQAP |
| | | RLIIYGASSRASAIPDRFRGSGSGTDFTLTISRLEPEDFAVYYCQQ |
| | | YDDAPITFGHGTRLEIKRTVAAPSVFIFPPSDE |
| 544 | 3BNC55KC | DIQMTQSPSSLSASVGDKVTITCQTSAGYLNWYQQRRGRAPKLL |
| | | MYDGSRLVTGVPSRFSGRRWGTQYNLTIGSLQPEDIATYYCQVY |
| | | EFFGPGTRLDLKSTVAA |
| 545 | 3BNC60KC | DIQMTQSPSSLSARVGDTVTITCQANGYLNWYQQRRGKAPKLLIY |
| | | DGSKLERGVPARFSGRRWGQEYNLTINNLQPEDVATYFCQVYEF |
| | | IVPGTRLDLKRTVAA |
| 546 | 3anc3kc | DIQMTQSPSSVSASVGDRVTITCQASRDTDNSLTWYQQKPGRPP |
| | | KLLIYHVVNLGPGVPSRFSGSASSATQSTLIISDFQPDDVATYFCQ |
| | | NYEFFGPGTKVEIKRTVAAPSVFIFPPSDEQ |
| 547 | 3b106kc | DIQMTQSPSSLSASVGDTVTITCQANGYLNWYQQRRGKAPKLLIY |
| | | DGSKLERGVPSRFSGRRWGQEYNLTINNLQPEDIATYFCQVYEF |
| | | VVPGTRLDLKRTVAAPSVFIFPPSD |
| 548 | 3b16kc | DIQMTQSPSSLSASVGDTVTITCQANGYLNWYQQRRGKAPKLLIY |
| | | DGSKLERGVPSRFSGRRWGQEYNLTINNLQPEDIATYFCQVYEF |
| | | VVPGTRLDLKRTVAAPSVFIFPPSD |
| 549 | 3b180kc | DIQMTQSPSSLSARVGDTVTFTCQANGYLNWYQQRRGKAPKLLI |
| | | YDGSKLERGVPSRFSGRGWGQEYNLTINNLQPEDIATYFCQVYE |
| | | FAVPGTRLDLKRTVAAPSVFIFPPSD |
| 550 | 3b183kc | DIQMTQSPSSLSARVGDTVTITCQANGYLNWYQQRRGKAPKLLIY |
| | | DGSKLETGVPSRFTGRRWGQEYNLTINNLQPEDIATYFCQVYEFI |
| | | VPGTRLDLKRTVAAPSVFIFPPSD |
| 551 | 3b191kc | DIQMTHSPSSLSASVGDTVTITCQANGYLNWYQQRRGKAPKLLIY |
| | | DGSKLETGVPSRFTGRRWGQEYNLTINNLQPEDIATYFCQVYEFI |
| | | VPGTRLDLKRTVAAPSVFIFPPSD |
| 552 | 3b21kc | DIQMTQSPSSLSARVGDTVTITCQANGYLNWYQQRRGKAPKLLIY |
| | | DGSKLETGVPSRFTGRRWGQEYNLTINNLQPEDIATYFCQVYEFI |
| | | VPGTRLDLKRTVAAPSVFIFPPSD |
| 553 | 3bnc102kc | DIQMTQSPSSLSASVGDRVTITCQASQGISNSLNWYQQKPGKAP |
| | | RLLIYGTSTLQRGVPSRFSGSGSGTRFTVTINSLQPEDIATYFCQH |
| | | NEFFGRGTKVDIKRTVAAPSVFIFPPSDEQL |
| 554 | 3bnc104kc | DIQMTQSPSSLSASIGDRVNITCQASRDTGSALNWYQQKVGRPP |
| | | RLLISAVSNLGAGVPSRFSGRRSGTQSTLTINTLQPEDIATYFCQH |
| | | YEFFGPGTKVDIKRTVAAPSVFIFPPSDEQ |
| 555 | 3bnc105kc | DIQMTQSPSSLSASVGDTVTFTCQANGYLNWYQQRRGKAPKLLI |
| | | YDGSRLERGVPSRFSGRRWGQEYNLTINNLQPEDIATYFCQVYE |
| | | FAVPGTRLDLKRTVAAPSVFIFPPSD |
| 556 | 3bnc107kc | DIQMTQSPSSLSASVGDTVTITCQTNKGYLNWYQQRRGRAPKLL |
| | | MYDGSKLVTGVPSRFSGRRWGTQYNLTIGSLQPEDIATYYCQVY |
| | | EFFGPGTRLDLKRTVAAPSVFIFPPSD |
| 557 | 3bnc108kc | DIQMTQSPSSLSARVGDKVTITYQTSAGYLNWYQQRRGRAPKLL |
| | | MYDGSRLVTGAPSRFSGRRWGTQYNLTIGSLQPEDIATYYCQVY |
| | | EFFGPGTRLDLKRTVAAPSVFIFPPSD |
| 558 | 3bnc117kc | DIQMTQSPSSLSASVGDTVTITCQANGYLNWYQQRRGKAPKLLIY |
| | | DGSKLERGVPSRFSGRRWGQEYNLTINNLQPEDIATYFCQVYEF |
| | | VVPGTRLDLKRTVAAPSVFIFPPSD |
| 559 | 3bnc134kc | DIQMTQSPSSLSASVGDTVTINCQTNKGYLNWYQQRRGRAPKLL |
| | | MYDGSKLVTGVPSRFSGRRWGTQYNLTIGSLQPEDIATYYCQVY |
| | | EFFGPGTRLDLKRTVAAPSVFIFPPSD |
| 560 | 3bnc142kc | DIQMTQSPSSLSASVGDTVTITCHTNKGYLNWYQQRRGRAPKLL |
| | | MFDGSKLVTGVPSRFSGRRWGTQYNLTIGSLQPEDIATYYCQVY |
| | | EVFGPGTRLDLKRTVAAPSVFIFPPSD |
| 561 | 3bnc151kc | DIQMTQSPSSLSASVGDTVTITCQTNKGYLNWYQQRRGRAPKLL |
| | | MYDGSKLVTGVPSRFSGRRWGTQYNLTIGSLQPEDIATYYCQVY |
| | | EFFGPGTRLDLKRTVAAPSVFIFPPSD |
| 562 | 3bnc153kc | DIQMTQSPSSLSASVGDTVTITCQTNKGYLNWYQQRRGRAPKLL |
| | | MYDGSKLVTGVPSRLSGRRWGTQYNLTIGSLQPEDIATYYCQVY |
| | | EFFGPGTRLDLKRTVAAPSVFIFPPSD |
| 563 | 3bnc156kc | DIQMTQSPSSLSASVGDTVTITCQTNKGYLNWYQQKRGRAPKLL |
| | | MYDGSKLVTGVPSRLSGRRWGTQYNLTIGSLQPEDIATYYCQVY |
| | | EFFGPGTRLDLKRTVAAPSVFIFPPSD |
| 564 | 3bnc158kc | DIQMTQSPSSLSASVGDTVTITCQTNKGYLNWYQQRRGRAPKLL |
| | | MYDGSKLVTGVPSRLSGRRWGTQYNLTIGSLQPEDIATYYCQVY |
| | | EFFGPGTRLDLKRTVAAPSVFIFPPSD |
| 565 | 3bnc159kc | DIQMTQSPSSLSASVGDTVTITCQTNKGYLNWYQQRRGRAPKLL |
| | | MYDGSKLVTGVPSRFSGRRWGTQYNLTIGSLQPEDIATYYCQVY |
| | | EFFGPGTRLDLKRTVAAPSVFIFPPSD |
| 566 | 3bnc15kc | DIQMTQSPSSLSASVGDTVTITCQTNKGYLNWYQQRRGRAPKLL |
| | | MYDGSKLVTGVPSRLSGRRWGTQYNLTIGSLQPEDIATYYCQVY |
| | | EFFGPGTRLDLKRTVAAPSVFIFPPSD |
| 567 | 3bnc176kc | DIQMTQSPSSLSASVGDTVTITCQANGYLNWYQQRRGKAPKLLIY |
| | | DGSKLERGVPSRFSGRRWGQEYNLTINNLQAEDIATYFCQVYEF |
| | | AVPGTRLDLKRTVAAPSVFIFPPSD |
| 568 | 3bnc193kc | DIQMTQSPSSLSARVGDKVTITCQTSAGYLNWYQQRRGRAPKLL |
| | | MYDGSRLVTGVPSRFSGRRWGTQYNLTIGSLQPEDIATYYCQVY |
| | | EFFGPGTRLDLKRTVAAPSVFIFPPSD |
| 569 | 3bnc196kc | DIQMTQSPSSLSASVGDTVTITCQANGYLNWYQQRRGKAPKLLM |
| | | YDGSTLERGVPARFSGRRWGQEYNLTINNLQPEDVATYFCQVYE |
| | | FIVPGTRLDLKRTVAAPSVFIFPPSD |
| 570 | 3bnc31kc | DIQMTQSPSSLSASVGDTVTITCQTNKGYLNWYQQRRGRAPKLL |
| | | MCDGSKLVTGVPSRFSGRRWGTQYNLTIGSLQPEDIATYYCQVY |
| | | EFFGPGTRLDLKRTVAAPSVFIFPPSD |
| 571 | 3bnc42kc | DIQMTQSPSSLSASVGDTVTITCQTTKGYLNWYQQRRGRAPKLL |
| | | MFDGSKLVTGVPSRFSGRRWGTQYNLTIGSLQPEDLATYYCQVY |
| | | EFFGPGTRLDLKRTVAAPSVFIFPPSD |
| 572 | 3bnc53kc | DIQMTQSPSSLSASVGDTVTITCHTNKGYLNWYQQRRGRAPKLL |
| | | MFDGSKLVTGVPSRFSGRRWGTQYNLTIGSLQPEDIATYYCQVY |
| | | EVFGPGTRLDLKRTVAAPSVFIFPPSD |
| 573 | 3bnc62kc | DIQMTQSPSSLSARVGDTVTITCQANGYLNWYQQRRGKAPKLLIY |
| | | DGSKLETGVPSRFTGRRWGQEYNLTINNLQPEDIATYFCQVYEFI |
| | | VPGTRLDLKRTVAAPSVFIFPPSD |
| 574 | 3bnc65kc | DIQMTQSPSSLSARVGDTVTFTCQANGYLNWYQQRRGKAPKLLI |
| | | YDGSKLERGVPSRFSGRRWGQEYNLTINNLQPEDIATYFCQVYE |
| | | FAVPGTRLDLKRTVAAPSVFIFPPSD |
| 575 | 3bnc66kc | DIQMTQSPSSLSASVGDTVTITCQTNKGYLNWYQQRRGRAPKLL |
| | | MYDGSKLVTGVPSRLSGRRWGTQYNLTIGSLQPEDIATYYCQVY |
| | | EFFGPGTRLDLKRTVAAPSVFIFPPSD |
| 576 | 3bnc75kc | DIQMTQSPSSLSARVGDTVTITCQANGYLNWYQQRRGKAPKLLIY |
| | | DGSKLERGVPSRFSGRRWGQEYNLTINNLQPEDIATYFCQVYEF |
| | | VVPGTRLDLKRTVAAPSVFIFPPSD |
| 577 | 3bnc79kc | DIQMTQSPSSLSARVGDTVTFTCQANGYLNWYQQRRGKAPKLLI |
| | | YDGSKLERGVPSRFSGRRWGQEYNLTINNLQPEDIATYFCQVYE |
| | | FAVPGTRLDLKRTVAAPSVFIFPSD |
| 578 | 3bnc81kc | DIQMTQSPSSLSASVGDTVTINCQTNKGYLNWYQQRRGRAPKLL |
| | | MYDGSKLVTGVPSRFSGRRWGTQYNLTIGSLQPEDIATYYCQVY |
| | | EFFGPGTRLDLKRTVAAPSD |
| 579 | 3bnc84kc | DIQMTQSPSSLSASVGDTVTINCQTNKGYLNWYQQRRGRAPKLL |
| | | MYDGSKLVTGVPSRFSGRRWGTQYNLTIGSLQPEDIATYYCQVY |
| | | EFFGPGTRLDLKRTVAAPSVFIFPPSD |
| 580 | 3bnc87kc | DIQMTQSPSSLSARVGDTVTITCQANGYLNWYQQRRGKAPKLLIY |
| | | DGSKLERGVPSRFSGRRWGQEYNLTINNLQPEDIATYFCQVYEF |
| | | VVPGTRLDLKRTVAAPSVFIFPPSD |
| 581 | 3bnc89kc | DIQMTQSPSSLSASVGDKVTITCQTSAGYLNWYQQRRGRAPKLL |
| | | MYDGSRLVTGVPSRFSGRRWGTQYNLTIGSLQPEDVATYYCQV |
| | | YEFFGPGTRLDLKRTVAAPSVFIFPPSD |
| 582 | 3bnc91kc | DIQMTQSPSSLSARVGDTVTITCQANGYLNWYQQRRGKAPKLLIY |
| | | DGSKLERGVPSRFSGRRWGQEYNLTINNLQPEDIATYFCQVYEF |
| | | AVPGTRLDLKRTVAAPSVFIFPPSD |
| 583 | 3bnc95kc | DIQMTQSPSSLSASVGDTVTITCQANGYLNWYQQRRGKAPKLLIY |
| | | DGSKLERGVPSRFSGRRWGQEYNLTINNLQPEDIATYFCQVYEFI |
| | | VPGTRLDLKRTVAAPSVFIFPPSD |

TABLE 1
Forward Leader Sequence Primers

| | | |
|---|---|---|
| VH1 LEADER-A | ATGGACTGGACCTGGAGGAT | SEQ ID NO 591 |
| VH1 LEADER-B | ATGGACTGGACCTGGAGCAT | SEQ ID NO 592 |
| VH1 LEADER-C | ATGGACTGGACCTGGACAAT | SEQ ID NO 593 |
| VH1 LEADER-D | GGCCTTCTCTTTGTGGTGGC | SEQ ID NO 594 |
| VH1 LEADER-E | ATGGACTGGACCTGGAGGGT | SEQ ID NO 595 |
| VH1 LEADER-F | ATGGACTGGATTTGGAGGAT | SEQ ID NO 596 |
| VH1 LEADER-G | AGGTTCCTCTTTGTGGTGGCAG | SEQ ID NO 597 |
| VH3 LEADER-A | TAAAAGGTGTCCAGTGT | SEQ ID NO 598 |
| VH3 LEADER-B | TAAGAGGTGTCCAGTGT | SEQ ID NO 599 |
| VH3 LEADER-C | TAGAAGGTGTCCAGTGT | SEQ ID NO 600 |
| VH3 LEADER-D | GCTATTTTTAAAGGTGTCCAGTGT | SEQ ID NO 601 |
| VH3 LEADER-E | TACAAGGTGTCCAGTGT | SEQ ID NO 602 |
| VH3 LEADER-F | TTAAAGCTGTCCAGTGT | SEQ ID NO 603 |
| VH4 LEADER-A | ATGAAACACCTGTGGTTCTTCC | SEQ ID NO 604 |
| VH4 LEADER-B | ATGAAACACCTGTTTCTT | SEQ ID NO 605 |
| VH4 LEADER-C | ATGAAGCACCTGTGGTTCTT | SEQ ID NO 606 |
| VH4 LEADER-D | ATGAAACATCTGTGGTTCTT | SEQ ID NO 607 |
| VH5 LEADER-A | TTCTCCAAGGAGTCTGT | SEQ ID NO 608 |
| VH5 LEADER-B | CCTCCACAGTGAGAGTCTG | SEQ ID NO 609 |
| VH6 LEADER-A | ATGTCTGTCTCCTTCCTCATC | SEQ ID NO 610 |
| VH7 LEADER-A | GGCAGCAGCAACAGGTGCCCA | SEQ ID NO 611 |

Reverse Constant Region Primers

| | | |
|---|---|---|
| 3′ Cg CH1 | GGAAGGTGTGCACGCCGCTGGTC | SEQ ID NO 612 |
| (gamma) | | |
| 3′ IgG | GTTCGGGGAAGTAGTCCTTGAC | SEQ ID NO 613 |
| (internal) | | |

TABLE 2

| | | | year | year | CD4+ | Virus | |
|---|---|---|---|---|---|---|---|
| | | | of | of | T cells/ | copies/ | clinical |
| | gender | clade | birth | diagnosis | ul | ml | status |
| pt1 | male | B | 1948 | 1985 | 354 | 4722 | non |
| | | | | | | | progressor |
| pt3 | male | B | 1965 | 2002 | 427 | 880 | non |
| | | | | | | | progressor |
| pt8 | male | B | 1962 | 1989 | 580 | <50 | elite |
| | | | | | | | controller |
| pt12 | male | ND | ND | ND | ND | ND | ND |

TABLE 3
A

| | | | | | | SEQ |
|---|---|---|---|---|---|---|
| | | | | | | ID |
| Ab Name | VH | D | JH | (−) | CDR3 (aa) | NO |
| 3BNC4 | 1-2 | 7-27 | 2/6 | 3 | R H S D Y C D F D V | 614 |
| 3BNC23 | 1-2 | 6-25/3-3 | 2/6 | 3 | Q R S D F W D F D V | 615 |
| 3BNC42 | 1-2 | 7-27 | 2/6 | 3 | R H S D Y C D F D V | 616 |
| 3BNC53 | 1-2 | 3-3 | 2/6 | 3 | R H S D Y C D F D V | 617 |
| 3BNC55 | 1-2 | 3-3/6-19/5-12 | 2/6 | 3 | R H S D Y C D F D I | 618 |
| 3BNC62 | 1-2 | 6-25/6-13/6-6 | 2/6 | 3 | Q R S D Y W D F D V | 619 |
| 3BNC65 | 1-2 | 6-25/6-6 | 2/6 | 3 | Q R S D Y W D F D V | 620 |
| 3BNC66 | 1-2 | 7-27 | 2/6 | 3 | R H T D Y C D F D V | 621 |
| 3BNC72 | 1-2 | 7-27 | 2/6 | 3 | R H S D Y C D F D V | 622 |
| 3BNC79 | 1-2 | 6-25/6-6 | 2/6 | 3 | Q R S D Y W D F D V | 623 |
| 3BNC81 | 1-2 | 7-27 | 2/6 | 3 | R H S D Y C D F D V | 624 |
| 3BNC89 | 1-2 | 3-3/6-19/5-12 | 2/6 | 3 | R H S D Y C D F D I | 625 |
| 3BNC91 | 1-2 | 2-21/6-25 | 2/6 | 3 | R R S D Y C D F D V | 626 |
| 3BNC95 | 1-2 | 6-25/2-8 | 2/6 | 3 | Q R S D Y W D F D V | 627 |
| 3BNC105 | 1-2 | 6-6/6-25 | 2/6 | 3 | Q R S D Y W D F D V | 628 |
| 3BNC107 | 1-2 | 7-27/3-3 | 2/6 | 3 | R H S D Y C D F D V | 629 |
| 3BNC108 | 1-2 | 3-3/6-19/6-25 | 2/6 | 3 | R H S D Y C D F D I | 630 |
| 3BNC117 | 1-2 | 6-25/2-8 | 2/6 | 3 | Q R S D Y W D F D V | 631 |
| 3BNC134 | 1-2 | 7-27 | 2/6 | 3 | R H S D Y C D F D V | 632 |
| 3BNC142 | 1-2 | 3-3 | 2/6 | 3 | R H S D Y C D F D V | 633 |
| 3BNC151 | 1-2 | 7-27/4-17/3-3 | 2/6 | 3 | R H S D Y C D L D V | 634 |
| 3BNC156 | 1-2 | 3-3/7-27 | 2/6 | 3 | R H S D Y C D F D V | 635 |
| 3BNC159 | 1-2 | 7-27 | 2/6 | 3 | R H S D Y C D F D V | 636 |
| 3BNC176 | 1-2 | 6-25/6-6 | 2/6 | 3 | Q R S D Y W D F D V | 637 |
| 3BNC196 | 1-2 | 6-25/6-6/6-13 | 2/6 | 3 | Q R S D Y W D F D V | 638 |
| 3BNC6 | 1-2 | 3-16/1-7 | 2 | 1 | P L R G G D T W H Y H S | 639 |
| 3BNC101 | 1-2 | 1-7/3-16 | 2 | 1 | P L R G G D T W H Y H S | 640 |
| 3BNC102 | 1-2 | 3-22/1-26/1-20 | 2 | 3 | P H S P D D A W S L D V | 641 |
| 3BNC126 | 1-2 | 3-22/1-26/1-20 | 2 | 3 | P H S P D D A W S L D V | 642 |
| 3BNC149 | 1-2 | 3-22/1-26/1-20 | 2 | 3 | P H S P D D A W S L D V | 643 |
| 3ANC3 | 1-2 | 2-21/2-15 | 1/2 | 1 | P R G G R D N W S F H V | 644 |
| 3ANC42 | 1-2 | ND | 2 | 2 | P K S G R D Y W S F D L | 645 |
| 3BNC3 | 1-69 | 5-5/5-18/5-24 | 3 | 2 | A T G Y S Y G Y L D A F D I | 646 |
| 3BNC8 | 1-24 | 5-24/4-17 | 4 | 3 | E P R E M G T L T A G F E Y | 647 |
| 3BNC48 | 1-69 | 3-3 | 4 | 5 | G Q T D L N D D L W S D Y S T | 648 |
| | | | | | P G F D Y | |
| 3ANC38 | 1-69 | 3-3 | 4 | 5 | G Q T D L N D D F W S E Y S T | 649 |
| | | | | | P G F D Y | |
| 3BNC49 | 1-69 | 3-22/6-19/5-12 | 6 | 3 | G E F D S S G F D Y E S W Y P | 650 |
| | | | | | Y Y M D V | |
| 3BNC58 | 1-24 | 3-16/3-10 | 4/5 | 2 | A P R L E L G E L S S G F H Y | 651 |
| 3BNC78 | 1-24 | | 4/5 | 2 | A P R L D L G E L S S G F H F | 652 |
| 3BNC78 | 1-24 | | 4/5 | 2 | A P R L D L G E L S S G F H F | 653 |
| 3BNC71 | 1-24 | 1-24 | 4/5 | 3 | D N P L L Q S G E F S S S L D N | 654 |
| 3BNC71 | 1-24 | 1-24 | 4/5 | 3 | D N P L L Q S G E F S S S L E N | 655 |
| 3BNC144 | 1-69 | 3-9/5-5 | 4 | 3 | A Q G D I L T E G Y F D Y | 656 |

| | | | Mutations | Primer | | | | |
|---|---|---|---|---|---|---|---|---|
| Ab Name | (+) | Length | HC | Set | k/l | Vk/l | Jk/l | (−) |
| 3BNC4 | 1 | 10 | 72 | new | k | 1D-33 | 3 | 1 |
| 3BNC23 | 1 | 10 | 79 | new | k | 1D-33 | 3 | 1 |
| 3BNC42 | 2 | 10 | 69 | new | k | 1D-33 | 3 | 1 |
| 3BNC53 | 2 | 10 | 74 | new | k | 1D-33 | 3 | 1 |
| 3BNC55 | 2 | 10 | 64 | new | k | 1D-33 | 1/3 | 1 |
| 3BNC62 | 1 | 10 | 81 | new | k | 1D-33 | 3 | 1 |
| 3BNC65 | 1 | 10 | 82 | new | k | 1D-33 | 3 | 1 |
| 3BNC66 | 2 | 10 | 69 | new | k | 1D-33 | 3 | 1 |
| 3BNC72 | 1 | 10 | 72 | new | k | 1D-33 | 3 | 1 |
| 3BNC79 | 1 | 10 | 76 | new | k | 1D-33 | 3 | 1 |
| 3BNC81 | 2 | 10 | 71 | new | k | 1D-33 | 3 | 1 |
| 3BNC89 | 2 | 10 | 68 | new | k | 1D-33 | 3 | 1 |
| 3BNC91 | 2 | 10 | 76 | new | k | 1D-33 | 3 | 1 |
| 3BNC95 | 1 | 10 | 72 | new | k | 1D-33 | 3 | 1 |
| 3BNC105 | 1 | 10 | 77 | new | k | 1D-33 | 3 | 1 |
| 3BNC107 | 2 | 10 | 69 | new | | | | |
| 3BNC108 | 2 | 10 | 62 | new | k | 1D-33 | 3 | 1 |
| 3BNC117 | 1 | 10 | 72 | new | k | 1D-33 | 3 | 1 |
| 3BNC134 | 2 | 10 | 71 | new | k | 1D-33 | 3 | 1 |
| 3BNC142 | 2 | 10 | 72 | new | k | 1D-33 | 3 | 1 |
| 3BNC151 | 2 | 10 | 69 | new | k | 1D-33 | 3 | 1 |
| 3BNC156 | 2 | 10 | 72 | new | k | 1D-33 | 3 | 1 |
| 3BNC159 | 2 | 10 | 71 | new | k | 1D-33 | 3 | 1 |
| 3BNC176 | 1 | 10 | 72 | new | k | 1D-33 | 3 | 1 |
| 3BNC196 | 1 | 10 | 78 | new | k | 1D-33 | 3 | 1 |
| 3BNC6 | 3 | 12 | 55 | new | k | 1D-33 | 1/3 | 1 |
| 3BNC101 | 3 | 12 | 54 | new | | | | |
| 3BNC102 | 1 | 12 | 63 | new | k | 1D-33 | 1/3 | 1 |
| 3BNC126 | 1 | 12 | 65 | new | | | | |
| 3BNC149 | 1 | 2 | 68 | new | | | | |
| 3ANC3 | 3 | 12 | 59 | new | k | 1D-33 | 3 | 1 |
| 3ANC42 | 2 | 12 | 53 | new | k | 1D-33 | 3 | 1 |
| 3BNC3 | 0 | 14 | 22 | new | L | 1-44 | 1 | 2 |
| 3BNC8 | 1 | 14 | 21 | old | k | 3-11 | 2 | 0 |
| 3BNC48 | 0 | 20 | 18 | new | | | | |
| 3ANC38 | 0 | 20 | 12 | new | 1 | 1-47 | 1/6 | 2 |
| 3BNC49 | 0 | 20 | 23 | old | k | 3-20 | 3 | |
| 3BNC58 | 1 | 15 | 16 | old | k | 3-11 | 2 | 0 |
| 3BNC78 | 2 | 15 | 38 | old | | | | |
| 3BNC78 | 2 | 15 | 39 | old | | | | |
| 3BNC71 | 0 | 16 | 22 | old | k | 3-11 | 5 | |
| 3BNC71 | 0 | 16 | 17 | old | k | 3-11 | 5 | |
| 3BNC144 | 0 | 13 | 15 | old | k/l | 1-44/1-47 | 1 | 2 |

| | | SEQ | | | | | | |
|---|---|---|---|---|---|---|---|---|
| | | ID | | | Mutations | | | # of |
| Ab Name | CDR3 (aa) | NO | (+) | Length | LC | Binding | NEUT | Relatives |
| 3BNC4 | Q V Y E F | 657 | 0 | 5 | 38 | | + | 7 |
| 3BNC23 | Q V Y E F | 658 | 0 | 4 | 50 | CD4BS | + | 5 |
| 3BNC42 | Q V Y E F | 659 | 0 | 5 | 42 | | − | 1 |
| 3BNC53 | Q V Y E V | 660 | 0 | 5 | 42 | | + | 1 |
| 3BNC55 | Q V Y E F | 661 | 0 | 5 | 32 | | + | 1 |
| 3BNC62 | Q V Y E F | 662 | 0 | 5 | 43 | | + | 4 |
| 3BNC65 | Q V Y E F | 663 | 0 | 5 | 44 | | ND | 1 |
| 3BNC66 | Q V Y E F | 664 | 0 | 5 | 38 | | + | 1 |
| 3BNC72 | Q V Y E F | 665 | 0 | 5 | 38 | | + | 1 |
| 3BNC79 | Q V Y E F | 666 | 0 | 5 | 44 | | ND | 2 |
| 3BNC81 | Q V Y E F | 667 | 0 | 5 | 38 | | ND | 2 |
| 3BNC89 | Q V Y E F | 668 | 0 | 5 | 35 | | + | 1 |
| 3BNC91 | Q V Y E F | 669 | 0 | 5 | 42 | | + | 1 |
| 3BNC95 | Q V Y E F | 670 | 0 | 5 | 39 | | + | 9 |
| 3BNC105 | Q V Y E F | 671 | 0 | 5 | 43 | | ND | 1 |
| 3BNC107 | ND | | | | | | ND | 1 |
| 3BNC108 | Q V Y E F | 672 | 0 | 5 | 38 | | + | 2 |
| 3BNC117 | Q V Y E F | 673 | 0 | 5 | 39 | CD4BS | + | 9 |
| 3BNC134 | Q V Y E F | 674 | 0 | 5 | 38 | | ND | 1 |
| 3BNC142 | Q V Y E V | 675 | 0 | 5 | 42 | | + | 1 |
| 3BNC151 | Q V Y E F | 676 | 0 | 5 | 40 | | ND | 1 |
| 3BNC156 | Q V Y E F | 677 | 0 | 5 | 37 | | + | 1 |
| 3BNC159 | Q V Y E F | 678 | 0 | 5 | 39 | | ND | 1 |
| 3BNC176 | Q V Y E F | 679 | 0 | 5 | 41 | | + | 3 |
| 3BNC196 | Q V Y E F | 680 | 0 | 5 | 43 | | ND | 1 |
| 3BNC6 | Q H Y E F | 681 | 1 | 5 | 44 | | + | 24 |
| 3BNC101 | ND | | | | | | ND | 1 |
| 3BNC102 | Q H Y E F | 682 | 1 | 5 | 34 | | − | 1 |
| 3BNC126 | ND | | | | | | ND | 1 |
| 3BNC149 | ND | | | | | | ND | 1 |
| 3ANC3 | Q H Y E F | 683 | 0 | 5 | 47 | | + | 1 |
| 3ANC42 | Q Q Y E F | 684 | 1 | 5 | 41 | | ND | 4 |
| 3BNC3 | A A W D D T | 685 | 0 | 9 | 19 | CD4i | + | 7 |
| | L Y V | | | | | | | |
| 3BNC8 | Q H R S I W | 686 | 2 | 11 | 10 | CD4i | + | 3 |
| | P L M C T | | | | | | | |
| 3BNC48 | ND | | | | | | ND | |
| 3ANC38 | G A W D D | 687 | 0 | 9 | 8 | CD4i | − | 2 |
| | T L Y V | | | | | | | |
| 3BNC49 | ND | | | | | CD4i | ND | 2 |
| 3BNC58 | Q Q R T I W | 880 | 1 | 11 | 10 | CD4i | ND | 2 |
| | P P G C S | | | | | | | |
| 3BNC78 | ND | | | | | | ND | 1 |
| 3BNC78 | ND | | | | | | ND | 2 |
| 3BNC71 | ND | | | | | CD4i | ND | 1 |
| 3BNC71 | | | | | | CD4i | ND | 1 |
| 3BNC144 | ND | | 1 | 9 | | CD4i | ND | 1 |

b

| Ab | | | | | | SEQ ID |
|---|---|---|---|---|---|---|
| Name | VH | D | JH | (−) | CDR3 (aa) | NO |
| 1NC2 | 1-46 | 3-22/5-5 | 4/5 | 4 | N E A D Y H D G N G H S L R G M F D Y | 881 |
| 1NC3 | 1-46 | 6-19 | 4/5 | 3 | A E A E S Q S H S R P I M F D F | 688 |
| 1NC7 | 1-46 | 6-19/1-14 | 4/5 | 3 | A E A E S Q S H S R P I M F D S | 689 |
| 1NC9 | 1-46 | 5-12/2-8 | 4/5 | 4 | Q D S D F H D G H G H T L R G M F D S | 690 |
| 1NC18 | 1-46 | 1-14/2-21 | 4/5 | 2 | N E P Q Y H S L P G M F D Y | 691 |
| 1NC24 | 1-46 | 3-16 | 4/5 | 3 | N E P Q Y H D G N G H S L P G M F D Y | 692 |
| 1NC29 | 1-46 | 3-16/6-19 | 4/5 | 3 | N E P Q Y Y D G S G H S L P G M F D Y | 693 |
| 1NC33 | 1-46 | 5-12 | 4/5 | 5 | L E A D G D D Y S P K M V D Y | 694 |
| 1NC46 | 1-46 | 3-9/3-16 | 4/5 | 3 | R E A D Y H D G N G H T L P G M F D F | 695 |
| 1NC48 | 1-46 | 3-9/6-19 | 4/5 | 2 | N E P Q Y F D G S G H S L P G M F D Y | 696 |
| 1NC52 | 1-46 | 3-16/6-19 | 4/5 | 3 | N E P Q Y Y D G S G H S L P G M F D Y | 697 |
| 1NC56 | 1-46 | 5-12/3-9 | 4/5 | 5 | L E A D G D D Y S P K M F D H | 698 |
| 1NC60 | 1-46 | 3-22/1-26 | 1/5 | 4 | L E A E S D S H S R P I M F D H | 699 |
| 1NC66 | 1-46 | 3-16 | 4/5 | 2 | N E P Q Y H D G N G H S L P G M F D F | 700 |
| 1NC70 | 1-46 | 3-16/6-19 | 4/5 | 3 | N E P Q Y Y D G S G H S L P G M F D Y | 701 |
| 1NC72 | 1-46 | 6-19/1-14 | 4/5 | 3 | A E A E S Q S H S R P I M F D F | 702 |
| 1NC94 | 1-46 | 6-13/6-19 | 4/5 | 3 | A E A A S D S H S R P I M F D H | 703 |
| 1NC95 | 1-46 | 3-16/6-19 | 4/5 | 4 | L E A D G S D Y S P K M F D F | 704 |
| 1NC107 | 1-46 | 3-3/5-12 | 4/5 | 5 | L E A D G D D Y S P K M F D Y | 705 |
| 1NC108 | 1-46 | 3-9/3-16 | 4/5 | 4 | R E A D Y H D G N G H T L P G M F D F | 706 |
| 1NC109 | 1-46 | 5-1/6-19 | 4/5 | 5 | L E A D G D D Y S P K M F D Y | 707 |
| 1NC110 | 1-46 | 5-24/6-19 | 4/5 | 4 | L E A D G D N Y S P K M V D Y | 708 |
| 1NC116 | 1-46 | 2-21 | 4 | 2 | N E P Q Y H S L P G M F D Y | 709 |
| 1NC118 | 1-46 | 3-9/5-12 | 4 | 3 | L E A D G G D Y S P K M F D Y | 710 |
| 1NC122 | 1-46 | 3-16/3-3 | 4 | 4 | L E A D G A D Y S P K M F D F | 711 |
| 1NC123 | 1-46 | 6-19 | 4 | 3 | A E A E S Q S H S R P I M F D Y | 712 |
| 1NC127 | 1-46 | 6-13/6-19 | 4/5 | 3 | A E A A S D S H S R P I M F D H | 713 |
| 1B344 | 1-46 | 3-22/1-26 | 1/5 | 4 | L E A E S D S H S R P I M F D H | 714 |
| 1B2416 | 1-46 | 1-14/3-16 | 4 | 4 | N E P Q Y H D D N G H S L P G M I D Y | 715 |
| 1B2503 | 1-46 | 6-19 | 5 | 3 | A E A E S Q S H S R P I M F D S | 716 |
| 1B2573 | 1-46 | 3-22 | 4/5 | 2 | N E P Q Y H D G N G H S L P G M F D S | 717 |
| 1NC5 | 1-69 | 3-3 | 3 | 1 | G R Q T F R A I W S G P P V V F D I | 718 |
| 1NC126 | 1-69 | 3-3 | 3 | 1 | G R Q T F R A I W S G P P A V F D I | 719 |
| 1NC16 | 4-34 | 3-10 | 5 | 2 | A V A G L W F E D A Y N W F G P | 720 |
| 1NC21 | 4-34 | 3-10 | 5 | 2 | A V K G L W F D E T Y T W F G P | 721 |
| 1NC54 | 4-34 | 3-10 | 5 | 2 | A V K G F W F D E P S T W F G P | 722 |
| 1NC57 | 4-34 | 3-10 | 5 | 2 | A V K G F W F D D P Y T W F G P | 723 |
| 1NC115 | 4-34 | 3-10 | 5 | 2 | A V K G F W F D E V Y N W F G P | 724 |

| Ab | | | Mutations | | | | | |
|---|---|---|---|---|---|---|---|---|
| Name | (+) | Length | HC | Primer Set | k/l | Vk/l | Jk/l | (−) |
| 1NC2 | 2 | 19 | 74 | new | l | 1-47 | 3 | 1 |
| 1NC3 | 2 | 16 | 86 | NEW | l | 1-47 | 6/7 | 1 |
| 1NC7 | 2 | 16 | 77 | new | l | 1-47 | 6/7 | 1 |
| 1NC9 | 4 | 19 | 67 | new | l | 1-47 | 3 | 1 |
| 1NC18 | 1 | 14 | 85 | new | | | | |
| 1NC24 | 2 | 19 | 79 | new | l | 1-47 | 3 | 1 |
| 1NC29 | 1 | 19 | 87 | new | | | | |
| 1NC33 | 0 | 15 | 84 | new | l | 1-47 | 3 | 2 |
| 1NC46 | 3 | 19 | 85 | new | l | 1-47 | 3 | 1 |
| 1NC48 | 1 | 19 | 88 | new | l | 1-47 | 3 | 1 |
| 1NC52 | 1 | 19 | 82 | new | l | 1-47 | 3 | 1 |
| 1NC56 | 2 | 15 | 91 | new | l | 1-47 | 3 | 1 |
| 1NC60 | 3 | 16 | 72 | new | l | 1-47 | 3 | 1 |
| 1NC66 | 2 | 19 | 91 | new | l | 1-47 | 3 | 1 |
| 1NC70 | 1 | 19 | 85 | new | l | 1-47 | 3 | 1 |
| 1NC72 | 2 | 16 | 77 | new | l | 1-47 | 6/7 | 1 |
| 1NC94 | 3 | 16 | 81 | new | l | 1-47 | 3 | 2 |
| 1NC95 | 0 | 15 | 93 | new | | | | |
| 1NC107 | 1 | 15 | 90 | new | l | 1-47 | 3 | 1 |
| 1NC108 | 3 | 19 | 85 | new | l | 1-47 | 3 | 1 |
| 1NC109 | 1 | 15 | 85 | new | | | | |
| 1NC110 | 1 | 15 | 88 | new | | | | |
| 1NC116 | 1 | 14 | 83 | new | | | | |
| 1NC118 | 0 | 15 | 86 | new | l | 1-47 | 3 | 1 |
| 1NC122 | 1 | 15 | 94 | new | l | 1-47 | 3 | 1 |
| 1NC123 | 2 | 16 | 78 | new | l | 1-47 | 3 | 1 |
| 1NC127 | 3 | 16 | 81 | new | l | 1-47 | 3 | 2 |
| 1B344 | 3 | 16 | 72 | new | l | 1-47 | 3 | 1 |
| 1B2416 | 2 | 19 | 81 | new | | | | |
| 1B2503 | 1 | 16 | 78 | new | l | 1-47 | 3 | 1 |
| 1B2573 | 2 | 19 | 81 | new | | | | |
| 1NC5 | 2 | 18 | 47 | new | k | 3-11 | 2 | 0 |
| 1NC126 | 2 | 18 | 47 | new | | | | |
| 1NC16 | 0 | 16 | 75 | new | k | 1D-39 | 2/3 | 0 |
| 1NC21 | 1 | 16 | 58 | new | | | | |
| 1NC54 | 1 | 16 | 59 | new | | | | |
| 1NC57 | 1 | 16 | 61 | new | | | | |
| 1NC115 | 1 | 16 | 58 | new | | | | |

| Ab | | SEQ | | | Mutations | | | # of |
|---|---|---|---|---|---|---|---|---|
| Name | CDR3 (aa) | ID NO | (+) | Length | LC | Binding | NEUT | Relatives |
| 1NC2 | A V Y D S S L S L G L | 725 | 0 | 11 | 47 | | + | 15 |
| 1NC3 | A T Y D S Q R S I R L | 726 | 2 | 11 | 55 | | + | 1 |
| 1NC7 | A T Y D S Q G S T R L | 727 | 1 | 11 | 51 | | + | 1 |
| 1NC9 | A A Y D S T F S L P V | 728 | 0 | 11 | 53 | ? | + | 2 |
| 1NC18 | ND | | | | | | ND | 1 |
| 1NC24 | A A Y D S S L S L R L | 729 | 0 | 11 | 30 | | + | 2 |
| 1NC29 | ND | | | | | | ND | 1 |
| 1NC33 | A T Y D T D L S L R L | 730 | 1 | 11 | 49 | | + | 1 |
| 1NC46 | A A Y D S A V S L P V | 731 | 0 | 11 | 52 | | ND | 1 |
| 1NC48 | A A Y D S T L S L R L | 732 | 1 | 11 | 37 | | ND | 1 |
| 1NC52 | A A Y D S T F S L P V | 733 | 0 | 11 | 54 | | ND | 1 |
| 1NC56 | A T Y D T G L S L R L | 734 | 1 | 11 | 58 | | ND | 1 |
| 1NC60 | A T Y D S G W S I R L | 735 | 1 | 11 | 46 | | + | 3 |
| 1NC66 | A A Y D S T L S L R L | 736 | 1 | 11 | 33 | | ND | 1 |
| 1NC70 | A A Y D S T L S L R L | 737 | 1 | 11 | 40 | | ND | 1 |
| 1NC72 | A T Y D S Q G S T R L | 738 | 1 | 11 | 51 | | + | 2 |
| 1NC94 | A T Y D S D G S I R L | 739 | 1 | 11 | 41 | | − | 5 |
| 1NC95 | ND | | | | | | ND | 1 |
| 1NC107 | A T Y D T G L S L R L | 740 | 1 | 11 | 58 | | ND | 1 |
| 1NC108 | A A F D S A L S L P L | 741 | 0 | 11 | 51 | | + | 1 |
| 1NC109 | ND | | | | | | ND | 1 |
| 1NC110 | ND | | | | | | ND | 1 |
| 1NC116 | ND | | | | | | ND | 1 |
| 1NC118 | A T Y D T G L S L R L | 742 | 1 | 11 | 54 | | ND | 1 |
| 1NC122 | G T Y D T S L S L R L | 743 | 1 | 11 | 57 | | ND | 1 |
| 1NC123 | A T Y D S H G S I R L | 744 | 2 | 11 | 48 | | − | 1 |
| 1NC127 | A T Y D S D G S I R L | 745 | 1 | 11 | 41 | ? | + | 5 |
| 1B344 | A T Y D S G W S I R L | 746 | 1 | 11 | 46 | | + | 1 |
| 1B2416 | ND | | | | | | ND | 1 |
| 1B2503 | G T Y D S Q G S T R L | 882 | 1 | 11 | 49 | | ND | 1 |
| 1B2573 | ND | | | | | | − | 2 |
| 1NC5 | Q H R S N W P W T | 883 | 2 | 9 | | CD4BS | + | 1 |
| 1NC126 | ND | | | | | | ND | 1 |
| 1NC16 | Q Q S F A V P Y T | 884 | 0 | 9 | 35 | ND | ND | 1 |
| 1NC21 | ND | | | | | ND | ND | 1 |
| 1NC54 | ND | | | | | ND | ND | 1 |
| 1NC57 | ND | | | | | ND | ND | 1 |
| 1NC115 | ND | | | | | ND | ND | 1 |

c

| | | | | | | SEQ |
|---|---|---|---|---|---|---|
| Ab Name | VH | D | JH | (−) | CDR3 (aa) | ID NO |
| 8ANC13 | 1-46 | 3-16 | 6 | 4 | D G L G E V A P D Y R Y G I D V | 885 |
| 8ANC22 | 1-46 | 3-16 | 6 | 3 | D G L G E V A P A Y L Y G I D A | 747 |
| 8ANC26 | 1-46 | 3-16 | 6 | 3 | D G L G E V A P A Y L Y G I D A | 748 |
| 8ANC37 | 1-46 | 3-16 | 6 | 3 | D G L G E V A P A Y L Y G I D A | 749 |
| 8ANC41 | 1-46 | 3-16 | 6 | 3 | D G L G E L A P A Y H Y G I D V | 750 |
| 8ANC50 | 1-46 | 3-16 | 6 | 3 | D G L G E L A P A Y Q Y G I D V | 751 |
| 8ANC88 | 1-46 | 3-16 | 6 | 4 | D G L G E V A P D Y R Y G I D V | 752 |
| 8ANC127 | 1-46 | 3-16 | 6 | 3 | D G L G E V A P A Y L Y G I D A | 753 |
| 8ANC131 | 1-46 | 3-16 | 6 | 3 | D G L G E V A P D Y R Y G I D V | 754 |
| 8ANC142 | 1-69 | 3-3 | ND | 2 | T S T Y D Q W S G L H H D G V M A F S S | 755 |
| 8ANC46 | 1-69 | 3-22/2-15 | 3 | 2 | S S G N F E F A F E I | 756 |
| 8ANC191 | 1-69 | 3-22/2-15 | 3 | 2 | S S G N Y D F A Y D I | 757 |
| 8ANC196 | 1-69 | 3-22/2-15 | 3 | 2 | S S G N Y D F A F D I | 758 |
| 8ANC14 | 1-24 | 6-13/5-5 | 4 | 4 | A D R F K V A Q D E G L F V I F D Y | 759 |
| 8ANC34 | 1-24 | 6-13/5-5 | 4 | 4 | A D P F K V A Q D E G L Y V I F D Y | 760 |
| 8ANC58 | 1-24 | 6-13/5-5 | 4 | 4 | A D P F K V A Q D E G L Y V I F D Y | 761 |
| 8ANC168 | 1-24 | 6-13/5-5 | 4 | 4 | A D P F K V A Q D E G L F V I F D Y | 762 |
| 8ANC5 | 1-69 | 4-17/3-10 | 6 | 8 | D R G D T R L L D Y G D Y E D E R Y Y Y G M D V | 763 |
| 8ANC7 | 1-69 | 4-17/3-10 | 6 | 8 | D R G D T R L L D Y G D Y E D E R Y Y Y G M D V | 764 |
| 8ANC9 | 1-69 | 4-17/3-10 | 6 | 8 | D R G D T R L L D Y G D Y E D E R Y Y Y G M D V | 765 |
| 8ANC77 | 1-69 | 4-17/3-10 | 6 | 8 | D R G D T R L L D Y G D Y E D E R Y Y Y G M D V | 766 |
| 8ANC107 | 1-69 | 4-17/3-10 | 6 | 8 | D R G D T R L L D Y G D Y E D E R Y Y Y G M D V | 767 |
| 8ANC108 | 1-69 | 4-17/3-10 | 6 | 8 | D R G D T R L L D Y G D Y E D E R Y Y Y G M D V | 768 |
| 8ANC137 | 1-69 | 4-17/3-10 | 6 | 8 | D R G D T R L L D Y G D Y E D E R Y Y Y G M D V | 769 |
| 8ANC16 | 1-69 | 2-2 | 3 | 2 | D R S S A I G Y C S S I S C Y K G S F D I | 770 |
| 8ANC24 | 1-24 | 2-2 | 6 | 1 | G G L Y C S S I S C I M D V | 771 |
| 8ANC25 | 1-24 | 2-2 | 6 | 1 | G G L Y C S S I S C I M D V | 772 |
| 8ANC38 | 3-43 | 3-16 | 5 | 1 | N G F D V | 773 |

| | | | Mutations | Primer | | | | |
|---|---|---|---|---|---|---|---|---|
| Ab Name | (+) | Length | HC | Set | k/l | Vk/l | Jk/l | (−) |
| 8ANC13 | 1 | 16 | 75 | new | k | 3-11 | 2/3 | 1 |
| 8ANC22 | 0 | 16 | 85 | new | | | | |
| 8ANC26 | 0 | 16 | 76 | new | k | 3-11 | 2/3 | 1 |
| 8ANC37 | 0 | 16 | 82 | new | k | 3-11 | 2/3 | 1 |
| 8ANC41 | 1 | 16 | 71 | new | k | 3-11 | 2/3 | 1 |
| 8ANC50 | 0 | 16 | 71 | new | k | 3-11 | 2/3 | 1 |
| 8ANC88 | 0 | 16 | 73 | new | k | 3-11 | 2/3 | 1 |
| 8ANC127 | 0 | 16 | 86 | new | | | | |
| 8ANC131 | 1 | 16 | 75 | new | k | 3-11 | 2/3 | 1 |
| 8ANC142 | 2 | 20 | 72 | new | k | 1-5 | 1/5 | 1 |
| 8ANC46 | 0 | 11 | 30 | old | l | 1-40 | 3 | 1 |
| 8ANC191 | 0 | 11 | 28 | old | | | | |
| 8ANC196 | 0 | 11 | 25 | old | | | | |
| 8ANC14 | 1 | 18 | 11 | old | k | 3-11 | 4 | 0 |
| 8ANC34 | 0 | 18 | 10 | new | | | | |
| 8ANC58 | 0 | 18 | 18 | new | | | | |
| 8ANC168 | 1 | 18 | 11 | new | | | | |
| 8ANC5 | 3 | 24 | 40 | old | k | 1D-33 | 2 | 0 |
| 8ANC7 | 3 | 24 | 37 | new | | | | |
| 8ANC9 | 3 | 24 | 35 | old | | | | |
| 8ANC77 | 3 | 24 | 50 | old | | | | |
| 8ANC107 | 3 | 24 | 38 | old | | | | |
| 8ANC108 | 3 | 24 | 37 | old | | | | |
| 8ANC137 | 3 | 24 | 37 | new | | | | |
| 8ANC16 | 1 | 21 | 12 | old | k | 3-15 | 2 | 0 |
| 8ANC24 | 0 | 14 | 12 | old | k | 3-15 | 1 | 0 |
| 8ANC25 | 0 | 14 | 6 | old | | | | |
| 8ANC38 | 0 | 5 | 70 | new | l | 2-11 | 3 | 0 |

| | | SEQ ID | | | Mutations | | | # of |
|---|---|---|---|---|---|---|---|---|
| Ab Name | CDR3 (aa) | NO | (+) | Length | LC | Binding | NEUT | Relatives |
| 8ANC13 | Q E Y S S T P Y N | 774 | 0 | 9 | 50 | | + | 1 |
| 8ANC22 | ND | | | | | | ND | 1 |
| 8ANC26 | Q E Y S S T P Y N | 775 | 0 | 9 | 55 | CD4BS | + | 2 |
| 8ANC37 | Q E Y S S T P Y N | 776 | 0 | 9 | 50 | CD4BS | + | 8 |
| 8ANC41 | Q E Y S S T P Y N | 777 | 0 | 9 | 42 | | + | 2 |
| 8ANC50 | Q E Y S S T P Y N | 778 | 0 | 9 | 46 | CD4BS | + | 2 |
| 8ANC88 | Q E Y S S T P Y N | 779 | 0 | 9 | 46 | | ND | 1 |
| 8ANC127 | ND | | | | | | ND | 1 |
| 8ANC131 | Q E Y S S T P Y N | 780 | 0 | 9 | 45 | CD4BS | + | 1 |
| 8ANC142 | Q Q Y D T Y P | 781 | 0 | 9 | 43 | ? | + | 2 |
| | G T | | | | | | | |
| 8ANC46 | Q S Y D R S L R | 782 | 1 | 11 | 30 | ND | ND | 1 |
| | G S V | | | | | | | |
| 8ANC191 | ND | | | | | | ND | 1 |
| 8ANC196 | ND | | | | | | ND | 1 |
| 8ANC14 | Q Q R A N W R | 783 | 2 | 10 | 9 | CD4i | + | 2 |
| | L L T | | | | | | | |
| 8ANC34 | ND | | | | | | ND | 5 |
| 8ANC58 | ND | | | | | | ND | 3 |
| 8ANC168 | ND | | | | | | ND | 1 |
| 8ANC5 | Q Q Y S N L P Y T | 784 | 0 | 9 | 17 | CD4i | − | 2 |
| 8ANC7 | ND | | | | | | ND | 2 |
| 8ANC9 | ND | | | | | | ND | 1 |
| 8ANC77 | ND | | | | | | ND | 3 |
| 8ANC107 | ND | | | | | | ND | 2 |
| 8ANC108 | ND | | | | | | ND | 4 |
| 8ANC137 | ND | | | | | | ND | 1 |
| 8ANC16 | Q Q Y Y Q W L | 785 | 0 | 10 | 13 | ND | ND | 8 |
| | S Y T | | | | | | | |
| 8ANC24 | Q Q Y N H W P | 786 | 0 | 9 | 7 | CD4i | + | 1 |
| | Q T | | | | | | | |
| 8ANC25 | ND | | | | | | ND | 1 |
| 8ANC38 | C L K K T S S Y V | 787 | 2 | 9 | 41 | CORE | + | 2 |

d

| Ab | | | | | | |
|---|---|---|---|---|---|---|
| Name | VH | D | JH | (−) | CDR3 (aa) | SEQ ID NO |
| 12A1 | 1-2 | 5-12/3- | 4/5 | 4 | D E S G D D L K W H L H P | 886 |
| | | 10 | | | | |
| 12A2 | 1-2 | 4-17 | 4/5 | 3 | D G S G D D T S W H L H P | 788 |
| 12A4 | 1-2 | 5-12/3- | 4/5 | 4 | D E S G D D L K W H L H P | 789 |
| | | 10 | | | | |
| 12A6 | 1-2 | 1-26/3- | 4/5 | 2 | D G S G D A T S W H L H P | 790 |
| | | 10 | | | | |
| 12A7 | 1-2 | 1-26 | 4/5 | 4 | D G S G D A R D W H L D P | 791 |
| 12A9 | 1-2 | 3-3 | 4/5 | 5 | D R R D D D R A W L L D P | 792 |
| 12A12 | 1-2 | 1-26/3- | 4/5 | 4 | D G S G D D T S W H L D P | 793 |
| | | 10 | | | | |
| 12A13 | 1-2 | 1-26 | 4/5 | 4 | D G S G D D T S W Y L D P | 794 |
| 12A20 | 1-2 | 1-26 | 4/5 | 3 | D G S G D A R D W H L H P | 795 |
| 12A22 | 1-2 | 3-16 | 4/5 | 4 | D G G G D D R T W L L D A | 796 |
| 12A23 | 1-2 | 3-3 | 4/5 | 5 | D R R D D G L D W L L D P | 797 |
| 12A27 | 1-2 | 1-26/3- | 4/5 | 3 | D G S G D D T S W H L H P | 798 |
| | | 10 | | | | |
| 12A46 | 1-2 | 3-10 | 4/5 | 1 | G G G D G R N W H L H P | 799 |
| 12A55 | 1-2 | 1-26 | 4/5 | 4 | D G S G D D R N W H L D P | 800 |
| 12A56 | 1-2 | 1-26 | 4/5 | 4 | D E S G Y D L N W H L D S | 801 |

| Ab | | | | Primer | | | | |
|---|---|---|---|---|---|---|---|---|
| Name | (+) | Length | # Mutations HC | Set | k/l | Vk/l | Jk/l | (−) |
| 12A1 | 2 | 13 | 60 | new | k | 1D-33 | 3 | 0 |
| 12A2 | 2 | 13 | 67 | new | k | 1D-33 | 3 | 10 |
| 12A4 | 2 | 13 | 59 | new | k | 1D-33 | 3 | 0 |
| 12A6 | 2 | 13 | 61 | new | k | 1D-33 | 3 | 1 |
| 12A7 | 1 | 13 | 62 | new | k | 1D-33 | 3 | 1 |
| 12A9 | 3 | 13 | 62 | new | k | 1D-33 | 3 | 1 |
| 12A12 | 1 | 13 | 60 | new | k | 1D-33 | 3 | 1 |
| 12A13 | 0 | 13 | 61 | new | k | 1D-33 | 3 | 1 |
| 12A20 | 3 | 13 | 61 | new | k | 1D-33 | 3 | 1 |
| 12A22 | 1 | 13 | 61 | new | k | 1D-33 | 3 | 1 |
| 12A23 | 2 | 13 | 51 | new | k | 1D-33 | 3 | 1 |
| 12A27 | 2 | 13 | 68 | new | k | 1D-33 | 3 | 1 |
| 12A46 | 3 | 13 | 62 | new | k | 1D-33 | 3 | 1 |
| 12A55 | 1 | 13 | 63 | new | k | 1D-33 | 3 | 2 |
| 12A56 | 1 | 13 | 66 | new | k | 1D-33 | 3 | 1 |

| Ab | | | | | Mutations | | | # of |
|---|---|---|---|---|---|---|---|---|
| Name | CDR3 (aa) | SEQ ID NO | (+) | Length | LC | Binding | NEUT | Relatives |
| 12A1 | A A F Q W | 887 | 0 | 5 | 39 | | ND | 1 |
| 12A2 | A V L E F | 802 | 0 | 5 | 44 | | + | 3 |
| 12A4 | A V F Q W | 803 | 0 | 5 | 36 | CD4BS | + | 3 |
| 12A6 | A V L E F | 804 | 0 | 5 | 39 | | + | 1 |
| 12A7 | A V L E F | 805 | 0 | 5 | 41 | | ND | 2 |
| 12A9 | Q L F E F | 806 | 0 | 5 | 39 | | ND | 1 |
| 12A12 | A V L E F | 807 | 0 | 5 | 41 | CD4BS | + | 1 |
| 12A13 | A V V E F | 808 | 0 | 5 | 41 | | ND | 1 |
| 12A20 | A A L E F | 809 | 0 | 5 | 40 | | + | 1 |
| 12A22 | S V Y E F | 810 | 0 | 5 | 39 | | + | 2 |
| 12A23 | Q L F E F | 811 | 0 | 5 | 39 | | + | 1 |
| 12A27 | A V L E F | 812 | 0 | 5 | 40 | | ND | 1 |
| 12A46 | A S L E F | 813 | 0 | 5 | 43 | | + | 1 |
| 12A55 | E V Y E F | 814 | 0 | 5 | 37 | | + | 1 |
| 12A56 | E S F Q W | 815 | 0 | 5 | 37 | | ND | 1 |

e

| Ab | | | | | | SEQ ID |
|---|---|---|---|---|---|---|
| Name | VH | D | JH | (−) | CDR3 (aa) | NO |
| 3B191 | 1-2 | 6-25/6-13/6-6 | 2/6 | 3 | Q R S D Y W D F D V | 816 |
| 3B6 | 4-39 | 3-9/3-10 | 3 | 2 | I P Y H S E S Y Y K V V I G | 817 |
| | | | | | G F D V | |
| 3B8 | 1-69 | 4-17/3-22 | 4 | 3 | D H G D P R T G Y Y F D Y | 818 |
| 3B27 | 3-64 | 3-9/1-26/4-17 | 5 | 1 | G P L L R Y L D S | 819 |
| 3B41 | 1-24 | 3-16 | 6 | 4 | K A K D Y Y Y E S S D Y S | 820 |
| | | | | | P Y Y Y Y Y M D V | |
| 3B46 | 4-31 | 3-3/2-8 | 4/5 | 0 | G S G R W T I G A R I Y F D N | 821 |
| 3B144 | 3-30 | 3-3/3-10/3-16 | 4/5 | 2 | T P P H Y D V L T G Y P S | 822 |
| | | | | | S V L E F | |
| 3B117 | 1-69 | 5-5/5-18/5-24 | 3 | 2 | A T G Y S Y G Y L D A F D I | 823 |
| 3A869 | 4-4/4-59 | 6-19/5-12/1-26 | 4 | 2 | E K G Q W L T V P P Y Y F | 824 |
| | | | | | D S | |
| 3A228 | 5-51 | 3-3/2-2 | 6 | 1 | T R C F G A N C F N F M D V | 825 |
| 3A461 | 1-46 | 2-2 | 4 | 1 | P E P S S I V A P L Y Y | 826 |
| 3A18 | 1-69 | 3-10/5-24 | 3 | 3 | D P Q V E V R G N A F D I | 827 |
| 3A125 | 1-46 | 1-20/1-7/3-10 | 3 | 2 | P Q Y N L G R D P L D V | 828 |
| 3A255 | 4-59 | 3-3/3-9 | 4 | 3 | A D Y D L L T S S Y H F D S | 829 |
| 3A233 | 4-59/4-61 | 3-3/4-17 | 4/5 | 3 | L D G E A F R Y Y L D L | 830 |

| Ab | | | # Mutations | | | | | |
|---|---|---|---|---|---|---|---|---|
| Name | (+) | Length | HC | Primer Set | k/l | Vk/l | Jk/l | (−) |
| 3B191 | 1 | 10 | 81 | new | k | 1D-33 | 3 | 1 |
| 3B6 | 1 | 18 | 50 | new | k | 1-9 | 1/3 | 0 |
| 3B8 | 2 | 13 | 50 | new | k | 3-20 | 1/5 | 2 |
| 3B27 | 0 | 9 | 18 | old | k | 3-11 | 1/5 | 0 |
| 3B41 | 2 | 22 | 17 | old | k | 3-20 | 2 | 0 |
| 3B46 | 2 | 15 | 22 | old | k | 3-20 | 1/4 | 0 |
| 3B144 | 1 | 18 | 23 | old | k | 3-15 | 1/5 | 0 |
| 3B117 | 0 | 14 | 22 | new | l | 1-44 | 1 | 2 |
| 3A869 | 1 | 1 | 33 | old | k | 1D-39 | 5 | 0 |
| 3A228 | 1 | 1 | 34 | old | k | 4-1 | 3 | 0 |
| 3A461 | 0 | 1 | 15 | old | k | 3-20 | 1 | 0 |
| 3A18 | 1 | 1 | 40 | old | k | 1D-39 | 5 | 0 |
| 3A125 | 1 | 1 | 22 | old | k | 3-20 | 1 | 0 |
| 3A255 | 1 | 1 | 35 | old | l | 7-43 | 3 | 0 |
| 3A233 | 1 | 1 | 32 | old | l | 2-14 | 2/3 | 0 |

| Ab | | SEQ ID | | | | | # of |
|---|---|---|---|---|---|---|---|
| Name | CDR3 (aa) | NO | (+) | Length | Binding | NEUT | Relatives |
| 3B191 | Q V Y E F | 831 | 0 | 5 | CD4BS | + | 7 |
| 3B6 | Q Q L A T | 832 | 0 | 5 | GP41 | + | 11 |
| 3B8 | Q Q Y D D A P I T | 833 | 0 | 9 | GP41 | − | 9 |
| 3B27 | Q H R T N W P P S I T | 834 | 2 | 11 | CD4i | − | 3 |
| 3B41 | Q Q Y G T S S C T | 835 | 0 | 9 | CD4i | − | 2 |
| 3B46 | Q Q Y G S S P P T | 836 | 0 | 9 | GP41 | ND | 2 |
| 3B144 | Q Q Y N N W P P I T | 837 | 0 | 10 | ND | ND | 4 |
| 3B117 | A A W D D T L Y V | 838 | 0 | 9 | ND | ND | 1 |
| 3A869 | Q Q S H S P S | 839 | 1 | 7 | CD4BS | + | 1 |
| 3A228 | Q Q Y Y I S P | 840 | 0 | 7 | VAR | + | 4 |
| 3A461 | Q Q Y G T L H P R T | 841 | 2 | 10 | GP41 | − | 3 |
| 3A18 | Q Q T Y T S P I T | 842 | 0 | 9 | GP41 | − | 2 |
| 3A125 | Q Q Y G L S P W T | 843 | 0 | 9 | GP41 | − | 4 |
| 3A255 | L L L P Y Y G G P W I | 844 | 0 | 11 | GP41 | − | 2 |
| 3A233 | S S F T P T N T L V | 845 | 0 | 10 | GP41 | − | 2 |

f

| Ab | | | | | | SEQ ID |
|---|---|---|---|---|---|---|
| Name | VH | D | JH | (−) | CDR3 (aa) | NO |
| 1B2434 | 15341 | 3-22/5-5 | 1 | 4 | N E A D Y H D G N G H S L R G M F D Y | 846 |
| 1B218 | 1-69 | 3-3 | 3 | 1 | G R Q T F R A I W S G P P V V F D I | 847 |
| 1B331 | 4-34 | 3-9/3-3 | 6 | 3 | R Y F D W S P F R R D T Y G T D V | 848 |
| 1B2174 | 4-34 | 3-9/3-3 | 6 | 3 | R Y L D W S P I G R D T Y G T D V | 849 |
| 1B2055 | 1-69 | 2-21 | 2/5 | 1 | G L C R G G N C R L G P S G W L D P | 850 |
| 1B2133 | 1-3 | 4-17/2-21 | 4 | 1 | V A Y V H V V T T R S L D N | 851 |
| 1A64 | 4-59 | 5-5/5-18 | 6 | 2 | H E A P R Y S Y A F R R Y Y H Y G L D V | 852 |
| 1A621 | 4-59 | 3-3/3-9 | 6 | 1 | V I S G R I T I F Y Y N Y I D V | 853 |
| 1A577 | 3-48 | 3-10/3-16 | 1 | 3 | G T L W F G E S G L R L D H | 854 |
| 1A732 | 3-7/3-73 | 3-22/3-10 | 6 | 2 | N R R V A M P E A M I L S F Y M D V | 855 |
| 1A74 | 4-34 | 3-3/3-9 | 4 | 1 | V V P M F S I F G V V K A N Y F D Y | 856 |
| 1A695 | 4-59 | 3-3/3-9 | 3 | 2 | A G L D Y N F W N G K G R K G A F D V | 857 |
| 1A479 | 1-69 | 3-22 | 4 | 1 | G F R G S P F S S G S L Y F D S | 858 |
| 1A182 | 1-69 | 4-17/1-26 | 6 | 6 | A V I T D L H T F G D Y E L E D P S Y | 859 |
| | | | | | Y Y M D V | |
| 1A 693 | 3-23 | 7-27/3-22 | 4 | 1 | R G R R Q I G D Y | 860 |
| 1A 79 | 5-51 | 3-9/3-3 | 3 | 4 | S Y Y D F S I G D G N D A F D V | 861 |
| 1A 27 | 3-11 | 3-6/5-5 | 5 | 2 | D T T T F T T F G G G P N M G G F D P | 862 |

| | | | # | | | | | |
|---|---|---|---|---|---|---|---|---|
| Ab | | | Mutations | Primer | | | | |
| Name | (+) | Length | HC | Set | k/l | Vk/l | Jk/l | (−) |
| 1B2434 | 2 | 19 | 74 | new | l | 1-47 | 3 | 1 |
| 1B218 | 2 | 18 | 47 | new | k | 3-11 | 2 | 0 |
| 1B331 | 3 | 17 | 40 | new | k | 4-1 | 1/4 | 0 |
| 1B2174 | 2 | 17 | 41 | new | k | 4-1 | 1/4 | 0 |
| 1B2055 | 2 | 18 | 62 | new | k | 3-15 | 1 | 2 |
| 1B2133 | 1 | 14 | 22 | new | k | 1D-39 | 1 | 0 |
| 1A64 | 5 | 20 | 20 | old | l | 1-44 | 3 | 2 |
| 1A621 | 1 | 16 | 30 | old | l | 1-47 | 3 | 1 |
| 1A577 | 1 | 14 | 15 | old | k | 1-16 | 2 | 0 |
| 1A732 | 2 | 18 | 9 | old | k | 3-20 | 3 | 0 |
| 1A74 | 1 | 18 | 23 | old | l | 1-51 | 3 | 1 |
| 1A695 | 3 | 19 | 9 | old | k | 1-5 | 1 | 1 |
| 1A479 | 1 | 16 | 25 | old | k | 3-20 | 1 | 0 |
| 1A182 | 1 | 24 | 28 | old | k | 1-5 | 1 | 0 |
| 1A693 | 3 | 9 | 17 | old | k | 1D-39 | 2 | 0 |
| 1A79 | 0 | 16 | 30 | old | l | 1-47 | 1 | 3 |
| 1A27 | 0 | 19 | 50 | old | | 1-9 | 1 | 0 |

| Ab | | SEQ | | | | | # of |
|---|---|---|---|---|---|---|---|
| Name | CDR3 (aa) | ID NO | (+) | Length | Binding | NEUT | Relatives |
| 1B2434 | A V Y D S S L S L G L | 863 | 0 | 11 | CD4BS | + | 7 |
| 1B218 | Q H R S N W P W T | 864 | 2 | 9 | CD4BS | + | 10 |
| 1B331 | H Q Y F S T P R T | 865 | 2 | 9 | CORE | + | 4 |
| 1B2174 | H Q Y F N T P R T | 866 | 2 | 9 | | ND | 1 |
| 1B2055 | Q Q Y E D P P W T | 867 | 0 | 9 | ND | ND | 3 |
| 1B2133 | Q Q T Y S N P R M | 868 | 1 | 9 | CD4i | − | 2 |
| 1A64 | A S W D D S L S G W V | 869 | 0 | 11 | CD4BS | + | 24 |
| 1A621 | A S W D N S L S G P V | 870 | 0 | 11 | CD4BS | + | 3 |
| 1A577 | Q Q Y N S F P PT | 871 | 0 | 9 | CD4BS | + | 8 |
| 1A732 | Q Q Y G R S P | 872 | 1 | 7 | CD4BS | + | 1 |
| 1A74 | G T W D S S L S A V L | 873 | 0 | 11 | CORE | + | 2 |
| 1A695 | Q Q Y D S | 874 | 0 | 5 | CORE | + | 2 |
| 1A479 | H Q Y A Y S P R T | 875 | 2 | 9 | CORE | + | 11 |
| 1A182 | Q Q Y K S Y S G T | 876 | 0 | 9 | CD4i | + | 3 |
| 1A693 | Q H S F G S P P W T | 877 | 1 | 11 | CD4i | − | 1 |
| 1A79 | A A W D D S F D Y V | 878 | 0 | 10 | V3 | + | 27 |
| 1A27 | Q Q L R T | 879 | 1 | 5 | GP41 | − | 8 |

TABLE 4
a
Patient 3, Clone RU01

| | 3BNC62 | 3BNC176 | 3BNC60 | 3BNC117 | 3BNC95 | 3BNC104 |
|---|---|---|---|---|---|---|
| MW965.26 | <0.09 | <0.10 | <0.04 | <0.09 | <0.07 | >50 |
| BaL.26 | <0.09 | <0.10 | <0.04 | <0.09 | <0.07 | 0.025 |
| DJ263.8 | <0.09 | <0.10 | <0.04 | <0.09 | <0.07 | 0.054 |
| 6535.3 | 0.68 | 0.46 | 0.54 | 0.55 | 1.0 | >50 |
| RHPA4259.7 | <0.09 | <0.10 | <0.05 | 0.041 | <0.07 | 0.0252 |
| TRO.11 | <0.09 | <0.10 | <0.05 | 0.077 | <0.07 | 3.791 |
| PVO.4 | <0.09 | <0.10 | 0.09 | <0.09 | <0.07 | 0.348 |
| YU2.DG | <0.09 | <0.10 | <0.05 | 0.054 | <0.07 | 0.034 |

Patient 3, Clone RU01

| | 3BNC91 | 3BNC55 | 3BNC89 | 3ANC3 | 3BNC53 | 3BNC72 |
|---|---|---|---|---|---|---|
| MW965.26 | <0.08 | 0.04 | >0.05 | 0.18 | 0.09 | <0.06 |
| BaL.26 | >178 | >30 | >110 | >50 | >30 | >139 |
| DJ263.8 | >178 | >30 | >110 | >50 | >30 | >139 |
| 6535.3 | 1 | 2.6 | 1.7 | >50 | 13.6 | 8.49 |
| RHPA4259.7 | <0.08 | 2.2 | 12.4 | 7.66 | 100.6 | >139 |
| TRO.11 | 3.06 | 18.4 | 52.4 | 10.76 | >155 | >139 |
| PVO.4 | 0.44 | 3.9 | 2.7 | 36.77 | >155 | >139 |
| YU2.DG | <0.08 | 0.9 | 0.39 | 35.01 | >155 | >139 |

Patient 3, Clone RU01

| | 3BNC156 | 3BNC158 | 3BNC153 | 3BNC108 |
|---|---|---|---|---|
| MW965.26 | 0.08 | 0.11 | 0.15 | ND |
| BaL.26 | >111 | >109 | >100 | 20.6 |
| DJ263.8 | >111 | >109 | >100 | >55 |
| 6535.3 | 11.1 | 9.9 | 28.9 | >55 |
| RHPA4259.7 | >111 | >109 | >100 | 45.91 |
| TRO.11 | >111 | >109 | >100 | >55 |
| PVO.4 | >111 | >109 | >100 | >55 |
| YU2.DG | >111 | >109 | >100 | 25.5 |

Patient 3, Clone RU01

| | 3BNC142 | 3BNC66 | 3BNC42 | 3BNC102 |
|---|---|---|---|---|
| MW965.26 | 0.14 | 1.24 | ND | >50 |
| BaL.26 | >172 | >189 | >26 | >50 |
| DJ263.8 | >172 | >189 | >26 | >50 |
| 6535.3 | >172 | >189 | >26 | >50 |
| RHPA4259.7 | >172 | >189 | >26 | >50 |
| TRO.11 | >172 | >189 | >26 | >50 |
| PVO.4 | >172 | >189 | NF | >50 |
| YU2.DG | >172 | >189 | >26 | >50 |

Patient 3 Clones RU02-07

| | 3A67 | 3A383 | 3BNC8 | 3ANC44 | 3A576 | 3ANC38 |
|---|---|---|---|---|---|---|
| MW965.26 | 0.1 | 0.5 | 0.74 | 25.49 | >50 | >50 |
| BaL.26 | 19.2 | 5.3 | >50 | 27.91 | 27 | >50 |
| DJ263.8 | >50 | >50 | >50 | >50 | >50 | >50 |
| 6535.3 | >50 | ND | >50 | >50 | >50 | >50 |
| RHPA4259.7 | >50 | ND | >50 | >50 | >50 | >50 |
| TRO.11 | >50 | ND | >50 | >50 | >50 | >50 |
| PVO.4 | >50 | ND | >50 | >50 | >50 | >50 |
| YU2.DG | >50 | ND | >50 | >50 | >50 | >50 |

B12 and NIH 45 Clone

| | B12 | VRC01 | NIH45-46 |
|---|---|---|---|
| MW965.26 | 0.2 | <0.08 | 0.04 |
| BaL.26 | 0.2 | 0.1 | <0.04 |
| DJ263.8 | >50 | 0.08 | <0.04 |
| 6535.3 | 1.4 | 0.539 | 0.14 |
| RHPA4259.7 | 0.1 | 0.06 | 0.034 |
| TRO.11 | >50 | 0.2 | 1.9 |
| PVO.4 | >50 | 0.2 | 0.17 |
| YU2.DG | 2.2 | 0.12 | <0.05 |

b
Patient 1, Clone RU08

| | 1B2640 | 1B2530 | 1B2364 | 1NC2 | 1NC9 | 1B2490 |
|---|---|---|---|---|---|---|
| MW965.26 | 41.76 | 0.762 | 1.85 | >50 | >50 | >50 |
| BaL.26 | 0.08 | >50 | >25 | 0.11 | 1.37 | 0.058 |
| DJ263.8 | >50 | 2.71 | 3.75 | >50 | >50 | >50 |
| 6535.3 | >50 | >50 | >25 | >50 | >50 | >50 |
| RHPA4259.7 | 0.04 | 3.6 | 2.18 | 0.59 | 0.09 | 0.414 |
| TRO.11 | 0.23 | 0.516 | 0.27 | 0.17 | 0.2 | 1.06 |
| PVO.4 | 1.05 | 0.275 | 0.161 | 0.37 | 0.34 | 2.97 |
| YU2.DG | 0.2 | 0.209 | 2.46 | 0.12 | 0.13 | 0.125 |

Patient 1, Clone RU08

| | 1B2351 | 1B344 | 1NC24 | 1NC3 | 1NC7 | 1NC33 |
|---|---|---|---|---|---|---|
| MW965.26 | >50 | >50 | >50 | >25 | >50 | >50 |
| BaL.26 | >50 | >50 | >50 | >25 | >50 | >50 |
| DJ263.8 | 8.46 | 12.62 | >50 | >25 | >50 | >50 |
| 6535.3 | >50 | >50 | >50 | >25 | >50 | 22.04 |
| RHPA4259.7 | 36.48 | 29.98 | >50 | >25 | 34.27 | >50 |
| TRO.11 | 0.331 | 0.27 | 0.2 | 3.37 | 16.57 | >50 |
| PVO.4 | 0.25 | 0.27 | 0.19 | 6.68 | 1.39 | 1.84 |
| YU2.DG | 0.058 | 0.25 | 0.16 | 18.26 | >50 | >50 |

Patient 1, Clone RU08

| | 1NC108 | 1B2644 | 1B2339 | 1NC123 |
|---|---|---|---|---|
| MW965.26 | >50 | >25 | >25 | >50 |
| BaL.26 | >50 | >25 | >25 | >50 |
| DJ263.8 | >50 | >25 | >25 | >50 |
| 6535.3 | >50 | >25 | >25 | >50 |
| RHPA4259.7 | >50 | >25 | >25 | >50 |
| TRO.11 | 19.37 | >25 | >25 | >50 |
| PVO.4 | 3.13 | >25 | >25 | >50 |
| YU2.DG | >50 | >25 | >25 | >50 |

Patient 1, Clone RU09

| | 1B218 |
|---|---|
| MW965.26 | >119 |
| BaL.26 | 1.1 |
| DJ263.8 | >119 |
| 6535.3 | 3.6 |
| RHPA4259.7 | >100 |
| TRO.11 | >100 |
| PVO.4 | >100 |
| YU2.DG | >100 |

c
Patient 8, Clone RU10

| | 8ANC192 | 8ANC134 | 8ANC13 | 8ANC131 | 8ANC182 | 8ANC50 | 8ANC45 |
|---|---|---|---|---|---|---|---|
| MW965.26 | >73 | >50 | >50 | >50 | >115 | >50 | >50 |
| BaL.26 | 0.08 | 0.02 | 0.04 | 0.06 | 0.08 | 0.17 | 0.296 |
| DJ263.8 | <0.03 | 0.003 | 0.008 | 0.004 | <0.05 | 0.04 | 0.041 |
| 6535.3 | 0.34 | 0.06 | 0.27 | 0.2 | 0.89 | 2.27 | 0.813 |
| RHPA4259.7 | >50 | >50 | >50 | >50 | >100 | >50 | >50 |
| TRO.11 | >100 | >50 | >50 | >50 | >100 | >50 | >50 |
| PVO.4 | 0.89 | 0.46 | 0.63 | 0.81 | 1.2 | 3.89 | 4.259 |
| YU2.DG | 0.09 | 0.15 | 0.21 | 0.18 | 0.22 | 0.42 | 0.499 |

Patient 8, Clones RU11-15

| | 8ANC57 | 8ANC195 | 8ANC24 | 8ANC14 | 8ACN5 |
|---|---|---|---|---|---|
| MW965.26 | 24.1 | >50 | 0.29 | 2.01 | >50 |
| BaL.26 | 4.35 | >50 | 47.53 | >50 | >50 |
| DJ263.8 | 30.19 | >50 | >50 | >50 | >50 |
| 6535.3 | >103 | 0.2 | >50 | >50 | >50 |
| RHPA4259.7 | 1.65 | 0.34 | >50 | >50 | >50 |
| TRO.11 | 32.07 | 0.18 | >50 | >50 | >50 |
| PVO.4 | 101.15 | 0.52 | >50 | >50 | >50 |
| YU2.DG | 27.52 | 0.79 | >50 | >50 | >50 |

d
Patient 12, Clone RU16

| | 12A12 | 12A21 | 12A4 | 12A37 | 12A22 | 12A16 |
|---|---|---|---|---|---|---|
| MW965.26 | 0.042 | 0.075 | 0.098 | 0.056 | 0.06 | 0.167 |
| BaL.26 | 0.017 | <0.001 | <0.001 | 0.005 | 0.04 | 0.042 |
| DJ263.8 | 0.002 | 0.035 | 0.017 | 0.013 | 0.08 | 0.012 |
| 6535.3 | 21.97 | >50 | >50 | >50 | >25 | 15.44 |
| RHPA4259.7 | 0.086 | 0.038 | 0.041 | 0.042 | 0.04 | 0.207 |
| TRO.11 | 0.288 | 0.164 | 0.257 | 0.827 | 0.56 | 0.751 |
| PVO.4 | 0.928 | 0.584 | 0.819 | 0.516 | 0.45 | 2.44 |
| YU2.DG | 0.084 | 0.015 | 0.018 | 0.019 | 0.11 | 0.234 |

Patient 12, Clone RU16

| | 12A20 | 12A6 | 12A23 | 12A46 | 12A55 |
|---|---|---|---|---|---|
| MW965.26 | 0.192 | 0.112 | 5.1 | >50 | 0.58 |
| BaL.26 | 0.035 | 0.072 | 0.57 | 0.013 | 2.87 |
| DJ263.8 | 0.05 | 0.004 | 0.63 | 5.79 | >50 |
| 6535.3 | 48.73 | >24 | 14.73 | 48.85 | >50 |
| RHPA4259.7 | 0.109 | 0.227 | 0.496 | >50 | >50 |
| TRO.11 | 0.689 | 1.52 | 2.88 | >50 | 21.45 |
| PVO.4 | 3.04 | 3.32 | 2.24 | 2.18 | 0.99 |
| YU2.DG | 0.142 | 0.222 | 0.053 | 0.49 | 0.1 |

B12 and NIH45 Clone

| | B12 | VRC01 | NIH45-46 |
|---|---|---|---|
| MW965.26 | 0.2 | <0.08 | 0.04 |
| BaL.26 | 0.2 | 0.1 | <0.04 |
| DJ263.8 | >50 | 0.08 | <0.04 |
| 6535.3 | 1.4 | 0.539 | 0.14 |
| RHPA4259.7 | 0.1 | 0.06 | <0.05 |
| TRO.11 | >50 | 0.2 | 1.9 |
| PVO.4 | >50 | 0.2 | 0.17 |
| YU2.DG | 2.2 | 0.12 | <0.05 |

e
Patient 3, clone RU01

| | 3BNC62 | 3BNC176 | 3BNC60 | 3BNC117 | 3BNC95 | 3BNC104 |
|---|---|---|---|---|---|---|
| MW965.26 | <0.09 | <0.10 | 0.09 | <0.09 | <0.07 | >50 |
| BaL.26 | <0.09 | <0.10 | <0.04 | <0.09 | <0.07 | 0.09 |
| DJ263.8 | 0.1 | <0.10 | 0.1 | 0.1 | 0.1 | 0.187 |
| 6535.3 | 2.24 | 1.7 | 1.77 | 2.44 | 4.5 | >50 |
| RHPA4259.7 | <0.09 | <0.10 | 0.07 | 0.137 | <0.07 | 0.06 |
| TRO.11 | <0.09 | <0.10 | 0.12 | 0.077 | <0.07 | 30.847 |
| PVO.4 | 0.23 | 0.16 | 0.27 | 0.19 | 0.23 | 0.901 |
| YU2.DG | <0.09 | <0.10 | 0.07 | 0.054 | <0.07 | 0.097 |

Patient 3, clone RU01

| | 3BNC91 | 3BNC55 | 3BNC89 | 3ANC3 | 3BNC53 | 3BNC72 | 3BNC156 |
|---|---|---|---|---|---|---|---|
| MW965.26 | <0.08 | 0.15 | 0.16 | 0.64 | 0.61 | 0.37 | 0.47 |
| BaL.26 | >178 | >30 | >110 | >50 | >30 | >139 | >111 |
| DJ263.8 | >178 | >30 | >110 | >50 | >30 | >139 | >111 |
| 6535.3 | 6.7 | 5.53 | 5.92 | >50 | 73.38 | 133.665 | 69.66 |
| RHPA4259.7 | 0.52 | 8.03 | >110 | >50 | >155 | >139 | >111 |
| TRO.11 | 32.31 | 41.67 | >110 | >50 | >155 | >139 | >111 |
| PVO.4 | 2.65 | 6.5 | 10.18 | >50 | >155 | >139 | >111 |
| YU2.DG | <0.08 | 1.07 | 1.49 | >50 | >155 | >139 | >111 |

Patient 3, clone RU01

| | 3BNC158 | 3BNC153 | 3BNC108 | 3BNC142 | 3BNC66 | 3BNC42 | 3BNC102 |
|---|---|---|---|---|---|---|---|
| MW965.26 | 0.6 | 0.63 | ND | 0.8 | 29.98 | ND | >50 |
| BaL.26 | >109 | >100 | >55 | >172 | >189 | >26 | >50 |
| DJ263.8 | >109 | >100 | >55 | >172 | >189 | >26 | >50 |
| 6535.3 | 97.75 | >100 | >55 | >172 | >189 | >26 | >50 |
| RHPA4259.7 | >109 | >100 | >55 | >172 | >189 | >26 | >50 |
| TRO.11 | >109 | >100 | >55 | >172 | >189 | >26 | >50 |
| PVO.4 | >109 | >100 | >55 | >172 | >189 | ND | >50 |
| YU2.DG | >109 | >100 | >55 | >172 | >189 | >26 | >50 |

Patient 3, Clones RU02-07

| | 3A67 | 3A383 | 3BNC8 | 3ANC44 | 3A576 | 3ANC38 |
|---|---|---|---|---|---|---|
| MW965.26 | 16 | >25 | 0.74 | >50 | >50 | >50 |
| BaL.26 | >50 | >25 | >50 | >50 | >50 | >50 |
| DJ263.8 | >50 | >25 | >50 | >50 | >50 | >50 |
| 6535.3 | >50 | ND | >50 | >50 | >50 | >50 |
| RHPA4259.7 | >50 | ND | >50 | >50 | >50 | >50 |
| TRO.11 | >50 | ND | >50 | >50 | >50 | >50 |
| PVO.4 | >50 | ND | >50 | >50 | >50 | >50 |
| YU2.DG | >50 | ND | >50 | >50 | >50 | >50 |

B12 and NIH 45 Clone

| | B12 | VRC01 | 45-46 |
|---|---|---|---|
| MW965.26 | ND | <0.08 | 0.21 |
| BaL.26 | ND | 0.1 | 0.06 |
| DJ263.8 | ND | 0.553 | 0.06 |
| 6535.3 | ND | 2.7 | 0.28 |
| RHPA4259.7 | 0.39 | 0.185 | 0.146 |
| TRO.11 | >50 | 0.832 | 9.56 |
| PVO.4 | >50 | 1.2 | 0.47 |
| YU2.DG | 7.8 | 0.372 | 0.08 |

f
Patient 1, Clone RU08

| | 1B2640 | 1B2530 | 1B2364 | 1NC2 | 1NC9 | 1B2490 | 1B2351 |
|---|---|---|---|---|---|---|---|
| MW965.26 | >50 | >50 | >25 | >50 | >50 | >50 | >50 |
| BaL.26 | 0.32 | >50 | >25 | 0.51 | 19.92 | 0.3 | >50 |
| DJ263.8 | >50 | >50 | >25 | >50 | >50 | >50 | >50 |
| 6535.3 | >50 | >50 | >25 | >50 | >50 | >50 | >50 |
| RHPA4259.7 | 0.25 | >50 | >25 | 4.33 | 0.4 | 1.97 | >50 |
| TRO.11 | 1.62 | 2.46 | 1.77 | 0.55 | 0.65 | 3.58 | 1.13 |
| PVO.4 | 2.97 | 1.25 | 0.65 | 1.08 | 1.32 | 10.57 | 0.88 |
| YU2.DG | 0.7 | 7.74 | >25 | 0.39 | 0.56 | 0.59 | 0.48 |

Patient 1, Clone RU08

| | 1B344 | 1NC24 | 1NC3 | 1NC7 | 1NC33 | 1NC108 | 1B2644 |
|---|---|---|---|---|---|---|---|
| MW965.26 | >50 | >50 | >25 | >50 | >50 | >50 | >25 |
| BaL.26 | >50 | >50 | >25 | >50 | >50 | >50 | >25 |
| DJ263.8 | >50 | >50 | >25 | >50 | >50 | >50 | >25 |
| 6535.3 | >50 | >50 | >25 | >50 | >50 | >50 | >25 |
| RHPA4259.7 | >50 | >50 | >25 | >50 | >50 | >50 | >25 |
| TRO.11 | 0.89 | 0.66 | >25 | >50 | >50 | >50 | >25 |
| PVO.4 | 0.94 | 0.6 | >25 | 7.17 | 10.12 | 25.08 | >25 |
| YU2.DG | 1.29 | 0.55 | >25 | >50 | >50 | >50 | >25 |

Patient 1, Clone RU08

| | 1B2339 | 1NC123 |
|---|---|---|
| MW965.26 | >25 | >50 |
| BaL.26 | >25 | >50 |
| DJ263.8 | >25 | >50 |
| 6535.3 | >25 | >50 |
| RHPA4259.7 | >25 | >50 |
| TRO.11 | >25 | >50 |
| PVO.4 | >25 | >50 |
| YU2.DG | >25 | >50 |

Patient 1, Clone RU09

| | 1B218 |
|---|---|
| MW965.26 | >119 |
| BaL.26 | 5.61 |
| DJ263.8 | >119 |
| 6535.3 | 35.12 |
| RHPA4259.7 | >100 |
| TRO.11 | >100 |
| PVO.4 | >100 |
| YU2.DG | >100 |

g
Patient 8, Clone RU 10

| | 8ANC192 | 8ANC134 | 8ANC13 | 8ANC131 | 8ANC182 | 8ANC50 | 8ANC45 |
|---|---|---|---|---|---|---|---|
| TRO.11 | >73 | >50 | >50 | >50 | >115 | >50 | >50 |
| BaL.26 | 0.43 | 0.11 | 0.18 | 0.31 | 0.73 | 0.77 | 7.45 |
| DJ263.8 | 0.1 | 0.044 | 0.069 | 0.046 | 0.11 | 0.15 | 0.166 |
| 6535.3 | 1.43 | 2 | 2.3 | 1.9 | 3.93 | 13.65 | 10.473 |
| RHPA4259.7 | >100 | >50 | >50 | >50 | >100 | >50 | >50 |
| TRO.11 | >100 | >50 | >50 | >50 | >100 | >50 | >50 |
| PVO.4 | 3.94 | 2.5 | 3.7 | 4.9 | 4.43 | 14.99 | 17.315 |
| YU2.DG | 0.51 | 0.616 | 1.07 | 0.92 | 1.46 | 1.59 | 2.942 |

Patient 8, Clones RU11-15

| | 8AN57 | 8AN195 | 8AN24 | 8AN14 | 8AN5 |
|---|---|---|---|---|---|
| TRO.11 | >103 | >50 | 0.76 | 6.64 | >50 |
| BaL.26 | 24.76 | >50 | >50 | >50 | >50 |
| DJ263.8 | >103 | >50 | >50 | >50 | >50 |
| 6535.3 | >103 | 0.91 | >50 | >50 | >50 |
| RHPA4259.7 | 14.44 | 1.56 | >50 | >50 | >50 |
| TRO.11 | >103 | 0.89 | >50 | >50 | >50 |
| PVO.4 | >103 | 1.87 | >50 | >50 | >50 |
| YU2.DG | 91.49 | 2.77 | >50 | >50 | >50 |

h
Patient 12, Clone RU16

| | 12A12 | 12A21 | 12A4 | 12A37 | 12A22 | 12A16 |
|---|---|---|---|---|---|---|
| MW965.26 | 0.2 | 0.85 | 1.24 | 0.3 | 0.21 | 0.58 |
| BaL.26 | 0.08 | 0.004 | 0.007 | 0.03 | 0.14 | 0.25 |
| DJ263.8 | 0.31 | 0.42 | 1.06 | 0.57 | 1.86 | 0.12 |
| 6535.3 | >50 | >50 | >50 | >50 | >25 | >42 |
| RHPA4259.7 | 0.4 | 0.13 | 0.19 | 0.19 | 0.13 | 0.93 |
| TRO.11 | 0.98 | 0.57 | 1.12 | 3.81 | 1.94 | 2.57 |
| PVO.4 | 3.15 | 2.09 | 2.95 | 1.8 | 1.49 | 8.72 |
| YU2.DG | 0.31 | 0.06 | 0.1 | 0.07 | 0.36 | 1.13 |

Patient 12, Clone RU16

| | 12A20 | 12A6 | 12A23 | 12A46 | 12A55 |
|---|---|---|---|---|---|
| MW965.26 | 2.2 | 0.52 | >50 | >50 | 4.49 |
| BaL.26 | 0.23 | 0.47 | 3.47 | 0.08 | >50 |
| DJ263.8 | ND | 0.08 | 30.81 | >50 | >50 |
| 6535.3 | ND | >24 | >50 | >50 | >50 |
| RHPA4259.7 | 0.49 | 1.02 | 1.69 | >50 | >50 |
| TRO.11 | 2.41 | 5.15 | 10.11 | >50 | >50 |
| PVO.4 | 11.2 | 17.34 | 7.81 | 797 | 4.3 |
| YU2.DG | 0.67 | 1.2 | 0.19 | 0.25 | 0.29 |

B12 and NIH45 Clone

| | B12 | VRC01 | NIH45-46 |
|---|---|---|---|
| MW965.26 | 0.2 | <0.08 | 0.04 |
| BaL.26 | 0.2 | 0.1 | <0.04 |
| DJ263.8 | >50 | 0.08 | <0.04 |
| 6535.3 | 1.4 | 0.539 | 0.14 |
| RHPA4259.7 | 0.1 | 0.06 | <0.05 |
| TRO.11 | >50 | 0.2 | 1.9 |
| PVO.4 | >50 | 0.2 | 0.17 |
| YU2.DG | 2.2 | 0.12 | <0.05 |

TABLE 5
a
In vitro Tzm-bl neutralization assay, extended panel IC50 values

| | B12 | VRC01 | NIH45-46 | 3BNC60 | 3BNC62 | 3BNC117 | 3BNC55 |
|---|---|---|---|---|---|---|---|
| Q842.d12 | >50 | 0.03 | 0.008 | 0.01 | <0.01 | <0.01 | 0.011 |
| 3415.v1.c1 | 2.5 | 0.06 | 0.017 | 0.1 | 0.17 | 0.17 | 0.11 |
| 3365.v2.c20 | >50 | 0.03 | 0.029 | 0.02 | 0.03 | 0.03 | 0.221 |
| H086.8* | >50 | >50 | >30 | >15 | >15 | >15 | >30 |
| ZM53M.PB12 | >50 | 1.3 | 0.187 | 0.22 | 0.3 | 0.21 | 12.549 |
| Du172.17* | 0.3 | >50 | >30 | 3.81 | 1.72 | 1.19 | 3.518 |
| ZM109F.PB4 | >50 | 0.128 | 0.059 | 0.22 | 0.14 | 0.14 | 0.083 |
| 3016.v5.c45 | 1.1 | 0.16 | >30 | 1.4 | 0.42 | 1.38 | >30 |
| 231965.c1 | 0.07 | 0.34 | 0.021 | 0.07 | 0.05 | 0.05 | 0.505 |
| X1254_c3 | >50 | 0.07 | 0.027 | 0.09 | 0.08 | 0.08 | 0.138 |
| 250-4* | >50 | >50 | >30 | >15 | >15 | >15 | 0.236 |
| 251-18 | >50 | 2.5 | 1.445 | 0.35 | 0.32 | 0.26 | >30 |
| 278-50* | >50 | >50 | >30 | >15 | >15 | >15 | >30 |
| 620345.c1* | >50 | >50 | >30 | >15 | >15 | >15 | >30 |
| R1166.c1 | >50 | 1.7 | 0.445 | 0.14 | 0.32 | 0.17 | 0.298 |

In vitro Tzm-bl neutralization assay, extended panel IC50 values

| | 1NC9 | 1B2530 | 8ANC131 | 8ANC134 | 8ANC195 | 12A12 | 12A21 |
|---|---|---|---|---|---|---|---|
| Q842.d12 | 0.02 | 0.249 | 0.053 | 0.061 | >30 | 0.014 | 0.015 |
| 3415.v1.c1 | 0.266 | 0.065 | 0.299 | 0.323 | 2.404 | 0.121 | 0.82 |
| 3365.v2.c20 | 0.329 | 4.357 | >30 | >30 | >30 | 0.068 | 0.045 |
| H086.8* | >30 | >30 | >50 | >50 | 0.095 | >30 | >30 |
| ZM53M.PB12 | 0.705 | 0.912 | >30 | >30 | 9.626 | 0.593 | 0.42 |
| Du172.17* | >30 | >30 | >30 | >30 | 10.797 | 0.196 | 0.126 |
| ZM109F.PB4 | 0.023 | >30 | >30 | >30 | >30 | 0.148 | 2.104 |
| 3016.v5.c45 | >30 | >30 | >30 | >30 | 0.195 | 1.163 | 0.097 |
| 231965.c1 | 0.393 | 0.168 | 6.346 | >30 | 0.514 | 2.217 | >30 |
| X1254_c3 | >30 | >30 | >30 | >30 | 1.524 | 1.032 | 26.793 |
| 250-4* | >30 | >30 | >50 | >50 | >50 | >30 | >30 |
| 251-18 | 1.234 | 9.847 | 0.968 | 1.56 | 0.284 | 2.622 | 1.713 |
| 278-50* | >30 | >30 | >50 | >50 | >50 | >30 | >30 |
| 620345.c1* | >30 | >30 | >50 | >50 | >50 | >30 | >30 |
| R1166.c1 | 0.651 | 0.119 | >30 | >30 | 0.986 | 0.342 | 0.292 |

b
In vitro Tzm-bl neutralization assay, extended panel IC80 values

| | B12 | VRC01 | 45-46 | 3BNC60 | 3BNC62 | 3BNC117 | 3BNC55 |
|---|---|---|---|---|---|---|---|
| Q842.d12 | >50 | 0.096 | 0.026 | 0.03 | 0.03 | 0.01 | 0.062 |
| 3415.v1.c1 | 14.1 | 0.15 | 0.069 | 0.37 | 0.4 | 0.47 | 0.388 |
| 3365.v2.c20 | >50 | 0.17 | 0.114 | 0.08 | 0.09 | 0.1 | 2.341 |
| H086.8* | >50 | >50 | >30 | >15 | >15 | >15 | >30 |
| ZM53M.PB12 | >50 | 4 | 0.652 | 0.76 | 1.1 | 0.85 | >30 |
| Du172.17* | 2.6 | >50 | >30 | >15 | 12.18 | 8.9 | >30 |
| ZM109F.PB4 | >50 | 0.754 | 0.22 | 1.23 | 0.78 | 0.88 | 0.396 |
| 3016.v5.c45 | 4 | 0.42 | >30 | 7.38 | 2.35 | >15 | >30 |
| 231965.c1 | 0.16 | 1.2 | 0.1 | 0.25 | 0.22 | 0.22 | 2.78 |
| X1254_c3 | >50 | 0.19 | 0.078 | 0.29 | 0.27 | 0.27 | 0.571 |
| 250-4* | >50 | >50 | >30 | >15 | >15 | >15 | 1.922 |
| 251-18 | >50 | 11.2 | 5.255 | 0.96 | 1 | 0.82 | >30 |
| 278-50* | >50 | >50 | >30 | >15 | >15 | >15 | >30 |
| 620345.c1* | >50 | >50 | >30 | >15 | >15 | >15 | >30 |
| R1166.c1 | >50 | 4.6 | 1.679 | 0.51 | 0.89 | 0.64 | 2.351 |

In vitro Tzm-bl neutralization assay, extended panel IC80 values

| | 1NC9 | 1B2530 | 8ANC131 | 8ANC134 | 8ANC195 | 12A12 | 12A21 |
|---|---|---|---|---|---|---|---|
| Q842.d12 | 0.133 | 2.191 | 0.179 | 0.205 | >30 | 0.06 | 0.066 |
| 3415.v1.c1 | 1.002 | 0.35 | 1.555 | 2.643 | 17.743 | 0.418 | 0.296 |
| 3365.v2.c20 | 2.163 | >30 | >30 | >30 | >30 | 0.192 | 0.166 |
| H086.8* | >30 | >30 | >50 | >50 | 5.328 | >30 | >30 |
| ZM53M.PB12 | 2.771 | 4.022 | >30 | >30 | >30 | 2.069 | 1.458 |
| Du172.17* | >30 | >30 | >30 | >30 | >30 | 0.992 | 0.037 |
| ZM109F.PB4 | 0.146 | >30 | >30 | >30 | >30 | 0.698 | 13.686 |
| 3016.v5.c45 | >30 | >30 | >30 | >30 | 0.872 | 11.864 | 0.358 |
| 231965.c1 | 2.276 | 0.963 | >30 | >30 | 2.355 | 15.102 | >30 |
| X1254_c3 | >30 | >30 | >30 | >30 | 6.949 | 5.777 | >30 |
| 250-4* | >30 | >30 | >50 | >50 | >50 | >30 | >30 |
| 251-18 | 6.291 | >30 | 5.55 | 6.281 | 1.511 | 9.39 | 6.063 |
| 278-50* | >30 | >30 | >50 | >50 | >50 | >30 | >30 |
| 620345.c1* | >30 | >30 | >50 | >50 | >50 | >30 | >30 |
| R1166.c1 | 2.669 | 0.684 | >30 | >30 | 4.83 | 1.85 | 2.137 |

TABLE 6
Affinity of IgG Antibodies to YU-2 gp140 and 2CC-
core Ligands Measured by Surface Plasmon Resonance

| | gp140 | | | 2CC-Core | | |
|---|---|---|---|---|---|---|
| | kₐ (M⁻¹s⁻¹) | k_{d} (s⁻¹) | K_{D} (M) | ka (M⁻¹s⁻¹) | k_{d} (s⁻¹) | K_{D} (M) |
| 12A12 | 4.59E+04 | 1.44E−05 | 3.15E−10 | 6.33E+04 | 1.70E−06 | 2.69E−11 |
| 12A21 | 9.18E+04 | 3.44E−07 | 3.75E12 | 1.82E+05 | 3.30E−04 | 1.81E−09 |
| 12AGL | / | / | / | / | / | / |
| 3BNC60 | 2.73E+04 | 1.86E−04 | 6.81E−09 | 3.02E+04 | 1.64E−03 | 5.45E−08 |
| 3BNC117 | 3.04E+04 | 1.99E−04 | 6.54E−09 | 1.49E−03 | 4.05E+04 | 3.68E−08 |
| 3BNC55 | 1.31E+04 | 7.55E−04 | 5.78E−08 | 8.15E−04 | 3.16E+04 | 2.57E−08 |
| 3BNC66 | 1.60E+04 | 1.41E−03 | 8.81E−08 | 3.96E+04 | 1.33E−03 | 3.36E−08 |
| 3BNC156 | 1.13E+04 | 1.98E−03 | 1.75E−07 | 1.88E+04 | 1.53E−03 | 8.12E−08 |
| 3BNC108 | / | / | / | / | / | / |
| 3BNC60GL | / | / | / | / | / | / |
| 8ANC131 | 6.59E+04 | 1.09E−03 | 1.65E−08 | 4.88E+04 | 3.23E−03 | 6.61E−08 |
| 8ANC134 | 1.55E+04 | 1.74E−03 | 1.13E−07 | 2.08E+04 | 9.57E−04 | 4.61E−08 |
| 8AGL | / | / | / | / | / | / |
| 8ANC195 | 4.88E+04 | 1.67E−03 | 3.43E−08 | 2.41E+04 | 1.32E−03 | 5.47E−08 |
| 1NC9 | 4.83E+04 | 5.81E−04 | 1.20E−08 | 5.11E+04 | 2.36E−04 | 4.61E−09 |
| 1B2530 | 4.74E+04 | 1.62E−03 | 3.42E−08 | 6.83E+04 | 4.02E−04 | 5.90E−09 |
| 1GL | / | / | / | / | / | / |
| 4546 | 4.26E+04 | 2.87E−04 | 6.75E−09 | 1.12E+05 | 4.94E−04 | 4.40E−09 |
| VRC01 | 1.83E+04 | 8.08E−06 | 4.41E−10 | 2.84E+04 | 3.25E−05 | 1.15E−09 |

TABLE 7

| | | |
|---|---|---|
| All | Consensus | Non Consensus |
| Nucleotides | Nucleotides | Nucleotides |

a
Replacement/Silent mutation ratios for heavy
chain sequences of 10 selected antibodies

| | | | |
|---|---|---|---|
| 3BNC117HC | 1.8 | 1.0 | 3.5 |
| 3BNC60HC | 2.0 | 1.1 | 4.4 |
| 12A12HC | 2.8 | 1.7 | 6.3 |
| 12A21HC | 2.6 | 1.5 | 4.8 |
| NIH4546HC | 1.7 | 0.9 | 5.5 |
| VRCO1HC | 2.2 | 1.1 | 22.0 |
| 8ANC131HC | 2.7 | 1.3 | 8.0 |
| 8ANC134HC | 2.2 | 1.5 | 3.7 |
| 1B2530HC | 2.0 | 0.9 | 11.0 |
| 1NC9HC | 1.9 | 0.7 | 12.0 |

b
Replacement/Silent mutation ratios for light
chain sequences of 10 selected antibodies

| | | | |
|---|---|---|---|
| 3BNC117KC | 1.7 | 0.8 | 2.8 |
| 3BNC60KC | 1.7 | 0.7 | 4.0 |
| 12A12KC | 1.7 | 0.6 | 4.0 |
| 12A21KC | 2.5 | 1.4 | 4.3 |
| NIH4546KC | 1.7 | 0.9 | 3.0 |
| VRCO1KC | 1.8 | 0.8 | 4.0 |
| 8ANC131KC | 1.5 | 0.5 | 4.2 |
| 8ANC134KC | 1.5 | 0.5 | 4.2 |
| 1B2530LC | 1.9 | 2.0 | 1.8 |
| 1NC9LC | 1.2 | 0.9 | 1.8 |

TABLE 8
Crystallization data collection and refinement statistics

| Crystal | 3BN60 Fab |
|---|---|
| Data collection* | |
| Wavelength (Å) | 0.9537 |
| Space group | P21 |
| Unit Cell dimensions | |
| a (Å) | 63.6 |
| b (Å) | 155.7 |
| c (Å) | 74.8 |
| α, β, γ (Y) | 90.0, 110.4, 90.0 |
| Resolution, (Å) | 39.172.65 |
| R_{mrgd}-F (%)^{§} | 8.3 (55.5) |
| Rₘₑₐₛ (%)^{§} | 7.7 (53.4) |
| I/σI | 15.7 (2.5) |
| Completeness (%) | 96.0 (68.1) |
| Multiplicity | 5.0 (3.6) |
| Reflections | 192709 |
| Unique reflections | 38111 |
| Refinement | |
| Resolution (Å) | 39.172.65 |
| No. reflections | 37086 |
| R_{work}/R_{free} (%)^{†} | 20.7/25.7 |
| RMSD Bond lengths (Å) | 0.01 |
| RMSD Bond angles (Y) | 1.3 |
| Average B-factor Å² | 64.9 |
| Ramachandran analysis | |
| Favored (%) | 91.9 |
| Allowed (%) | 7.6 |
| Outlier (%) | 0.5 |

What is claimed is:

1. An isolated HIV antibody comprising one or both of a heavy chain comprising the consensus amino acid sequence of SEQ ID NO:1 and a light chain comprising the consensus amino acid sequence of SEQ ID NO:2.

2. The isolated HIV antibody of claim 1 wherein the antibody neutralizes HIV virus ZM53M.PB12 at an IC₅₀ concentration of less than 1.0 μg/ml, or HIV virus R1166.c1 at an IC₅₀ concentration of less than 1.0 μg/ml, or DU172.17 at an IC₅₀ concentration of less than 30 μg/ml.

3. The isolated HIV antibody of claim 1 wherein the antibody neutralizes a VRC01-resistant HIV virus at an IC₅₀ concentration of less than 30 μg/ml.

4. An isolated HIV antibody selected from the group consisting of 3BNC117, 3BNC60, 12A12, 12A21, NIH45-46, bANC131, 8ANC134, IB2530, INC9 and 8ANC196

5. An isolated HIV antibody comprising an amino acid sequence selected from the group consisting of SEQ ID NOs: 5-583.

6. An isolated HIV antibody comprising at least one of insertion sequence SEQ ID No: 3 in the FR3 region of the heavy chain and insertion sequence SEQ ID No: 4 in the CDR3 region of the heavy chain.

7. A method to improve the neutralization potency of an isolated HIV antibody comprising making an isolated HIV antibody comprising at least one of insertion sequence SEQ ID No: 3 in the FR3 region of the heavy chain and insertion sequence SEQ ID No: 4 in the CDR3 region of the heavy chain

8. A composition comprising an isolated HIV antibody of any one of claims 1-6.

9. A nucleic acid molecule encoding the isolated HIV antibody of any one of claims 1-6.

10. A vector comprising the nucleic acid molecule of claim 9.

11. A cell comprising the vector of claim 10.

12. A pharmaceutical composition comprising at least one antibody of any one of claims 1-6 or a fragment thereof and a pharmaceutically acceptable carrier.

13. A method of preventing or treating an HIV infection or an HIV-related disease comprising the steps of:
a) identifying a patient in need of such prevention or treatment, and
b) administering to said patient a therapeutically effective amount of at least one HIV antibody of any one of claims 1-6.

14. The method of claim 13, additionally comprising the administration of a second therapeutic agent.

15. The method of claim 14, wherein said second therapeutic agent is an antiviral agent.

16. A method for making an HIV antibody or fragment thereof according to claims 1-6, said method comprising culturing a cell comprising a vector comprising a nucleic acid encoding the heavy and light chains of said antibody under conditions whereby the nucleic acid is expressed, and isolating said HIV antibody or fragment thereof.

17. A method to detect the HIV antibody of any one of claims 1-6 in a patient said method comprising isolating a biological sample from the patient and assaying the biological sample for the presence of the HIV antibody or a cell that contains at least one of the DNA or mRNA encoding the antibody.

18. A method for preventing or treating HIV infection or an HIV-related disease comprising steps: (a) identifying a patient in need of such prevention or treatment, (b) administering to said patient a therapeutically effective amount of at least one HIV antibody, or fragment thereof, made by the method of claim 16.

19. An isolated nucleic acid molecule for amplifying at least one nucleic acid molecule according to claim 9.

20. The method according to claim 16, wherein the nucleic acid is amplified with at least one isolated nucleic acid molecule according to claim 19.

21. An isolated oligonucleotide comprising a nucleic acid sequence selected from the group consisting of SEQ ID NOs:584 to 613.

22. A kit comprising a pharmaceutically acceptable dose unit of a pharmaceutically effective amount of at least one isolated HIV antibody according to claim 1, and a pharmaceutically acceptable dose unit of a pharmaceutically effective amount of an HIV agent selected from the group consisting of a non-nucleoside reverse transcriptase inhibitor, a protease inhibitor, a entry or fusion inhibitor and an integrase inhibitors, wherein the two pharmaceutically acceptable dose units can optionally take the form of a single pharmaceutically acceptable dose unit.

23. A kit for the diagnosis, prognosis or monitoring the treatment of HIV in a subject comprising one or more detection reagents which specifically bind to anti-HIV neutralizing antibodies in a biological sample from a subject.

24. The kit of claim 23, further comprising reagents for performing PCR.

25. The kit of claim 23, further comprising reagents for performing mass spectrometry.

The application's sequence listing, which the Patent Office published only in electronic form, follows.

SEQUENCE LISTING (887 sequences)

SEQ ID NO: 1 - protein, 123 aa, Homo sapiens
  misc_feature: X can indicate any amino acid or no amino acid
  misc_feature (2)..(3): Xaa can be any naturally occurring amino acid
  misc_feature (5)..(5): Xaa can be any naturally occurring amino acid
  misc_feature (10)..(10): Xaa can be any naturally occurring amino acid
  misc_feature (16)..(16): Xaa can be any naturally occurring amino acid
  misc_feature (19)..(19): Xaa can be any naturally occurring amino acid
  misc_feature (23)..(23): Xaa can be any naturally occurring amino acid
  misc_feature (28)..(29): Xaa can be any naturally occurring amino acid
  misc_feature (31)..(32): Xaa can be any naturally occurring amino acid
  misc_feature (34)..(34): Xaa can be any naturally occurring amino acid
  misc_feature (38)..(38): Xaa can be any naturally occurring amino acid
  misc_feature (44)..(44): Xaa can be any naturally occurring amino acid
  misc_feature (46)..(47): Xaa can be any naturally occurring amino acid
  misc_feature (51)..(51): Xaa can be any naturally occurring amino acid
  misc_feature (53)..(53): Xaa can be any naturally occurring amino acid
  misc_feature (56)..(56): Xaa can be any naturally occurring amino acid
  misc_feature (58)..(61): Xaa can be any naturally occurring amino acid
  misc_feature (63)..(64): Xaa can be any naturally occurring amino acid
  misc_feature (75)..(80): Xaa can be any naturally occurring amino acid
  misc_feature (82)..(84): Xaa can be any naturally occurring amino acid
  misc_feature (89)..(89): Xaa can be any naturally occurring amino acid
  misc_feature (93)..(93): Xaa can be any naturally occurring amino acid
  misc_feature (104)..(121): Xaa can be any naturally occurring amino acid
  misc_feature (123)..(123): Xaa can be any naturally occurring amino acid
QXXLXQSGGXVKKPGXSVXVSCXASGYXXFXXYXIHWXRQAPGXGXXWVGXIXPRXGXXXXAXXFQGRLSLTRDXXXXXXTXXXFMDLXGLRXDDTAVYFCARXXXXXXXXXXXXXXXXXXDX

SEQ ID NO: 2 - protein, 101 aa, Homo sapiens
  misc_feature: X indicates any amino acid or no amino acid
  misc_feature (3)..(3): Xaa can be any naturally occurring amino acid
  misc_feature (9)..(9): Xaa can be any naturally occurring amino acid
  misc_feature (13)..(13): Xaa can be any naturally occurring amino acid
  misc_feature (15)..(15): Xaa can be any naturally occurring amino acid
  misc_feature (18)..(19): Xaa can be any naturally occurring amino acid
  misc_feature (24)..(26): Xaa can be any naturally occurring amino acid
  misc_feature (28)..(34): Xaa can be any naturally occurring amino acid
  misc_feature (36)..(36): Xaa can be any naturally occurring amino acid
  misc_feature (42)..(42): Xaa can be any naturally occurring amino acid
  misc_feature (44)..(44): Xaa can be any naturally occurring amino acid
  misc_feature (51)..(53): Xaa can be any naturally occurring amino acid
  misc_feature (55)..(58): Xaa can be any naturally occurring amino acid
  misc_feature (62)..(62): Xaa can be any naturally occurring amino acid
  misc_feature (67)..(69): Xaa can be any naturally occurring amino acid
  misc_feature (71)..(72): Xaa can be any naturally occurring amino acid
  misc_feature (74)..(74): Xaa can be any naturally occurring amino acid
  misc_feature (76)..(76): Xaa can be any naturally occurring amino acid
  misc_feature (79)..(79): Xaa can be any naturally occurring amino acid
  misc_feature (81)..(82): Xaa can be any naturally occurring amino acid
  misc_feature (85)..(85): Xaa can be any naturally occurring amino acid
  misc_feature (87)..(87): Xaa can be any naturally occurring amino acid
  misc_feature (91)..(92): Xaa can be any naturally occurring amino acid
  misc_feature (95)..(101): Xaa can be any naturally occurring amino acid
EIXLTQSPXSLSXSXGEXXTISCXXXQXXXXXXXLXWYQQRXGXARPLLIXXXSXXXXGVPXRFSGXXXGXXYXLXISXLXXDDXAXYFCXXYEXXXXXXX

SEQ ID NO: 3 - protein, 7 aa, Homo sapiens
ASWDFDF

SEQ ID NO: 4 - protein, 5 aa, Homo sapiens
TARDY

SEQ ID NO: 5 - protein, 129 aa, Homo sapiens
QGQLVQSGGGLKKPGTSVTISCLASEYTFNEFVIHWIRQAPGQGPLWLGLIKRSGRLMTAYNFQDRLSLRRDRSTGTVFMELRGLRPDDTAVYYCARDGLGEVAPDYRYGIDVWGQGSTVIVTAASTKG

SEQ ID NO: 6 - protein, 129 aa, Homo sapiens
QGLLVQSGGGVKKLGTSVTISCLASEYTFNEFVIHWIRQAPGQGPLWLGLIKRSGRLMTSYQFQDRLSLRRDRSTGTVFMELRGLRVDDTAVYYCARDGLGEVAPAYLYGIDAWGQGTTVIVTSASTKG

SEQ ID NO: 7 - protein, 129 aa, Homo sapiens
FQGHLVQSGGGVKKPGTSVTLSCLASEYTFTEFTIHWIRQAPGQGPLWLGLIKRSGRLMTSYRFQDRLSLRRDRSTGTVFMELRSLRTDDTAVYYCARDGLGELAPAYHYGIDAWGQGTTVIVTSASTS

SEQ ID NO: 8 - protein, 127 aa, Homo sapiens
QGHLVQSGGGVKKLGTSVTISCLASEYTFNEFVIHWIRQAPGQGPLWLGLIKRSGRLMTSYQFQDRLSLRRDRSTGTVFMELRGLRVDDTAVYYCARDGLGEVAPAYLYGIDAWGQGTTVIVTSAST

SEQ ID NO: 9 - protein, 128 aa, Homo sapiens
QGHLVQSGGGVKKLGTSVTISCLASEDTFNEFVIHWIRQAPGQGPLWLGLIKRSGRLMTSYQFQDRLSLRRDRSTGTVFMELRGLRVDDTAVYYCARDGLGEVAPAYLYGIDAWGQGTTVIVTSASTS

SEQ ID NO: 10 - protein, 127 aa, Homo sapiens
  misc_feature (10)..(10): Xaa can be any naturally occurring amino acid
GHLVQSGGGXKKPGTSVTISCLASEYTFTEFTIHRIRQAPGQGPLWLGLIKGSGRLMTSYGFQDRLSLRRDRSTGTVFMELRSLRTDDTAVYYCARDGLGELAPAYHYGIDVWGQGTTVIVTSASTS

SEQ ID NO: 11 - protein, 132 aa, Homo sapiens
GVHFQGHLVQSGGGVKKPGSSVTISCLASEYTFTEFTIHWIRQAPGQGPLWLGLIKRSGRLMTSYRFQDRLSLRRDRSTGTVFMELRGLRIDDTAVYYCARDGLGEVAPAYLYGIDVWGQGTTVIVTSASTS

SEQ ID NO: 12 - protein, 129 aa, Homo sapiens
FQGQLVQSGGGVKKPGSSVTISCLASEYTFTEFTIHWIRQAPGQGPLWLGLIKRSGRLMTSYGFQDRLSVRRDRSTGTVFMELRSLRTDDTAVYYCARDGLGELAPAYHYGIDVWGQGTTVIVTSASTS

SEQ ID NO: 13 - protein, 128 aa, Homo sapiens
QGQLVQSGGGVKKLGTSVTISCLASEYTFNEFVIHWIRQAPGQGPLWLGLIKRSGRLMTSYQFQDRLSLRRDRSTGTVFMELRGLRVDDTAVYYCARDGLGEVAPAYLYGIDAWGQGTTVIVTSASTS

SEQ ID NO: 14 - protein, 130 aa, Homo sapiens
  misc_feature (9)..(9): Xaa can be any naturally occurring amino acid
  misc_feature (31)..(31): Xaa can be any naturally occurring amino acid
QGHLVQSGXEVKKPGSSVKVSCKASGGTFSXYAIGWVRQAPGQGLEWMGGIIPILGTTNYAQRFQGGVTITADESTNTAYMDVSSLRSDDTAVYYCAKAPYRPRGSGNYYYAMDVWGQGTTVIVSSASTS

SEQ ID NO: 15 - protein, 129 aa, Homo sapiens
QGHLVQSGGGVKKLGTSVTISCLASEYTFNEFVIHWIRQAPGQGPLWLGLIKRSGRLMTSYQFQDRLSLRRDRSTGTVFMELRGLRVDDTAVYYCARDGLGEVAPAYLYGIDAWGQGTTVIVTSASTKG

SEQ ID NO: 16 - protein, 129 aa, Homo sapiens
QGQLVQSGGGVKKLGTSVTISCLASEYTFNEFVIHWIRQAPGQGPLWLGLIKRSGRLMTSYQFQDRLSLRRDRSTGTVFMELRGLRVDDTAVYYCARDGLGEVAPAYLYGIDAWGQGTTVIVSSASTKG

SEQ ID NO: 17 - protein, 129 aa, Homo sapiens
QGHLVQSGGGVKKLGTSVTISCLVSEYTFNEFVIHWIRQAPGQGPLWLGLIKRSGRLMTSYQFQDRLSLRRDRSTGTVFMELRGLRVDDTAVYYCARDGLGEVAPAYLYGIDAWGQGTTVIVTSASTKG

SEQ ID NO: 18 - protein, 129 aa, Homo sapiens
QGQLVQSGGGLKKPGTSVTISCLASEYTFNEFVIHWIRQAPGQGPLWLGLIKRSGRLMTAYNFQDRLRLRRDRSTGTVFMELRGLRPDDTAVYYCARDGLGEVAPDYRYGIDVWGQGSTVIVTAASTKG

SEQ ID NO: 19 - protein, 129 aa, Homo sapiens
QGQLVQSGGGVKKPGTSVTISCLASEYTFNEFVIHWIRQAPGQGPVWLGLIKRSGRLMTSYKFQDRLSLRRDRSTGTVFMELRGLRLDDTAVYYCARDGLGEVAPAYLYGIDAWGQGSTVIVTSASTKG

SEQ ID NO: 20 - protein, 129 aa, Homo sapiens
QGQLVQSGGGVKKPGASVTISCLASEYTFNEFVIHWIRQAPGQGPLWLGLIKRSGRLMTAYKFQDRLSLRRDRSTGTVFMELRGLRPEDTAVYYCARDGLGEVAPDYRYGIDVWGQGSTVIVSAASTKG

SEQ ID NO: 21 - protein, 129 aa, Homo sapiens; identical to SEQ ID NO: 15

SEQ ID NO: 22 - protein, 132 aa, Homo sapiens
GVHFQGHLVQSGGGVKKPGSSVTISCLASEYTFTEFTIHWIRQAPGQGPLWLGLIKRSGRLMTSYRFQDRLSLRRDRSTGTVFMELRGLRIDDTAVYYCARDGLGEVAPAYLYGIDVWGQGSTVIVTSASTS

SEQ ID NO: 23 - protein, 129 aa, Homo sapiens
QGQLVQSGGGVKKPGTSVTISCLASEYTFTEFTIHWIRQAPGQGPLWLGLIKRSGRLMTAYRFQDRLSLRRDRSTGTVFMELRNLRMDDTAVYYCARDGLGELAPAYQYGIDVWGQGTTVIVSSASTKG

SEQ ID NO: 24 - protein, 129 aa, Homo sapiens; identical to SEQ ID NO: 15

SEQ ID NO: 25 - protein, 129 aa, Homo sapiens
QGHLVQSGGGVKKLGTSVTISCLASEDTFNEFVIHWIRQAPGQGPLWLGLIKRSGRLMTSYQFQDRLSLRRDRSTGTVFMELRGLRVDDTAVYYCARDGLGEVAPAYLYGIDAWGQGTTVIVTSASTKG

SEQ ID NO: 26 - protein, 129 aa, Homo sapiens
QGQLVQSGGGVKKPGTSVTISCLASEYTFNEFVIHWIRQAPGQGPVWLGLIKRSGRLMTSYKFQDRLSLRRDRSTGTVFMELRGLRLDDTAVYYCARDGLGEVAPAYLYGIDAWGQGSKVIVTPASTKG

SEQ ID NO: 27 - protein, 129 aa, Homo sapiens
QGQLVQSGGGVKKLGTSVTIPCLASEYTFNEFVIHWIRQAPGQGPLWLGLIKRSGRLMTSYQFQDRLSLRRDRSTGTVFMELRGLRVDDTAVYYCARDGLGEVAPAYLYGIDAWGQGTTVIVTSASTKG

SEQ ID NO: 28 - protein, 129 aa, Homo sapiens
QGQLVQSGGGVKKLGTSVTISCLASEYTFNEFVIHWIRQAPGQGPLWLGLIKRSGRLMTSYQFQDRLSLRRDRSTGTVFMELRGLRVDDTAVYYCARDGLGEVAPAYLYGIDAWGQGTTVIVTSASTKG

SEQ ID NO: 29 - protein, 129 aa, Homo sapiens; identical to SEQ ID NO: 15

SEQ ID NO: 30 - protein, 129 aa, Homo sapiens; identical to SEQ ID NO: 15

SEQ ID NO: 31 - protein, 129 aa, Homo sapiens
QGQLVQSGGGVKKTGTSVTISCLASEYTFTEFTIHWIRQAPGQGPLWLGLIKRSGRLMTANRFQDRLSLRRDRSTGTVFMELRSLRIDDTAVYYCARDGLGELAPAYHYGIDVWGQGTTIIVTSASTKG

SEQ ID NO: 32 - protein, 129 aa, Homo sapiens; identical to SEQ ID NO: 31

SEQ ID NO: 33 - protein, 129 aa, Homo sapiens; identical to SEQ ID NO: 23

SEQ ID NO: 34 - protein, 129 aa, Homo sapiens
QGQLVQSGGGGKKLGTSVTISCLASEYTFNEFVIHWIRQAPGQGPLWLGLIKRSGRLMTSYQFQDRLSLRRDRSTGTVFMELRGLRVDDTAVYYCARDGLGEVAPAYLYGIDAWGQGTTVIVSSASTKG

SEQ ID NO: 35 - protein, 129 aa, Homo sapiens
QGQLVQSGGGVKKPGTSVTISCLASEYTFNEFVIHWIRQAPGQGPLWLGLIKRSGRLMTSYKFQDRLNLRRDRSTGTVFMELRGLRPDDTAVYYCARDGLGEVAPDYRYGIDVWGQGSTVIVTAASTKG

SEQ ID NO: 36 - protein, 131 aa, Homo sapiens
QVQLQQWGSGLLKPSETLSLTCAVYGGSFRSYYWNWIRQSPGKGLEWIGEVSHSGSTNYNPALKSRVTISVDTSKNQFSLKVKSVTAADTALYYCSRGRGKRCSGAYCFAGYFDSWGQGGLVVVSSASTKG

SEQ ID NO: 37 - protein, 132 aa, Homo sapiens
EVQLVESGGGVVEPGESLRLSCAASGFTFRSYDMFWVRQATGKSLEWVSAIGIAGDTYYSGSVKGRFTISRENARTSLYLQLSGLRVEDSAVYFCVRGSPPRIAATEYNYYYGLDVWGQGTTVSVFSASTKG

SEQ ID NO: 38 - protein, 138 aa, Homo sapiens
VVQLVQSGAEVRKPGSSLKVSCKSSGGTFSRYVVNWVRQAPGQGLEWMGGMIPIFGIAKYAQKFQDRVTMTADESKNTVYLDFSSLRSDDTAVYYCARDRGDTRLLDYGDYEDERYYYGMDVWGQGTTVIVSSASTKG

SEQ ID NO: 39 - protein, 138 aa, Homo sapiens
QVQLVQSGAEVRKPGSSLKVSCKSSGGTFSRYVVNWVRQAPGQGLEWMGGIIPIFGIAKYAQKFQDRVTMTADEPKNTVYLDFNSLRSDDTAVYYCARDRGDTRLLDYGDYEDERYYYGMDVWGQGTTVIVSSASTKG

SEQ ID NO: 40 - protein, 125 aa, Homo sapiens
EVQLVESGGGLVKPGGSLRLSCAASGFSFSEHYMSWIRLAPGKGLEWLSYISSSTRTTYSADSVRGRFTISRDTAKQLLFLHMSSLRAEDTAVYYCVRLYGGINGWFDQWGQGTLVSVSSASTKG

SEQ ID NO: 41 - protein, 123 aa, Homo sapiens
QVQLVQSGAEVKKPGSSVKVSCKTSGGSFSNYAFSWVRQAPGEGLEWMGRIIPIFGTAKYTQKLQGRVTITADKFTSTVYMELSSLRSEDTAIYYCASLHQGPIGYTPWHPPPRAPLGQSVCG

SEQ ID NO: 42 - protein, 139 aa, Homo sapiens
QVQLVESGAEVKKPGASVKVSCKASGYTFTSHDINWVRQATGQGLEWMGWMNPNSGDTGYAHKFQGRVTMTRNTPISTAYMELSSLRSEDTAVYYCARGRATSRNTPWAHYYDSSGYYGAGDYWGQGTLVTVSSASTKG

SEQ ID NO: 43 - protein, 133 aa, Homo sapiens
QVQLVESGGGVVQPGRSLRLFCAASGFAFNTYGMHWVRQAPGKGLEWVAVTWHDGSQKYYADSVKGRFTISRDNSKNTLYLQMNSLRAEDTAIYYCASDQGGFDDSSGYFAPGGMDVWGRGTTVIVSSAPTKG

SEQ ID NO: 44 - protein, 121 aa, Homo sapiens
QVQLVESGAELRKPGESLEISCKASGYSFSSHWIGWARQMPGKGLEWMGIIYPGDSNTIYSPSFQGQVTISADKSINTAYLQWSSLKASDTAMYFCASNYHDYFYWGQGTLVTVSSASTKG

SEQ ID NO: 45 - protein, 135 aa, Homo sapiens
EVQLVESGAEVKKPGSSVKVSCKASGGTFSTYAFSWVRQAPGQGLEWMGGIIPIFGTENYAQKFQGRVTITADKSTSTAYMELSSLRSEDTAVYYCARDRSSAIGYCSSISCYKGSFDIWGQGTMVTVSSASTKG

SEQ ID NO: 46 - protein, 138 aa, Homo sapiens; identical to SEQ ID NO: 39

SEQ ID NO: 47 - protein, 135 aa, Homo sapiens
EVQLVQSGAEVKKPGSSVKVSCKASGGTFSTYAFSWVRQAPGQGLEWMGGIIPIFGTENYAQKFQGRVTITADKSTSTAYMELSSLRSEDTAVYYCARDRSSAIGYCSSISCYKGSFDIWGQGTMVTVSSASTKG

SEQ ID NO: 48 - protein, 143 aa, Homo sapiens
QVFVQLVQSGGGLVQPGGSVRLSCTASGFLFSTYSMNWVRQAPGKGLEWVSSISTTSNYIYYADSVKGRFTISRSNGQGSLYLQLNSLRVEDTAVYYCARDTKVGAPRQDCYAMDLWGQRDHGHRLLSFHQGPIGLPPGALLQ

SEQ ID NO: 49 - protein, 129 aa, Homo sapiens
QVQLLESGPGLVTPSGTLSLACAVSGASISSSHWWTWVRQSPGKGLEWIGEIDRRGTTNYNPSLRSRVTILLDNSKNQFSLSLRSVTAADTAVYYCTKVYAGLFNERTYGMDVWGHGTTVLVSSASTKG

SEQ ID NO: 50 - protein, 138 aa, Homo sapiens
QVQLVESGAEVRKPGSSLKVSCKSSGGTFSRYVVNWVRQAPGQGLEWMGGIIPIFGIAKYAQKFQDRVTMTADESKNTVYLDFSSLRSDDTAVYYCARDRGDTRLLDYGDYEDERYYYGMDVWGQGTTVIVSSASTKG

SEQ ID NO: 51 - protein, 132 aa, Homo sapiens
QVQLLQSGAEVKKPGASVKVSCKVSGYTLTELSINWVRQAPGKGLEWMGGFDPEDDEAIYEPKFQGRLTMTEDTSTDTAYMELSSLRSEDTAVYYCATADPFKVAQDEGLYVIFDYWGQGTLVTVSSASTKG

SEQ ID NO: 52 - protein, 131 aa, Homo sapiens
QVQLVQSGTEVQKPGASVKVSCKTSGYTFSKYYIHWVRQAPGQGLEWVGRINTDSGGTDYAEKFQGRVTMTRDTSITTVYLEMRGLTSDDTAAFYCARGPPHAGGWTIYYYGLDVWGQGTSVIVSSASTKG

SEQ ID NO: 53 - protein, 132 aa, Homo sapiens
QVQLVQSGAEVKKPGASVKVSCKVSGHTLSELSINWVRHVPGKGLEWMGGLDPEDGEAIHEPKFQGRLTMTEDTSTDTAYVELSSLRSEDTAMYYCATADPFKVAQDEGLYVIFDYWGQGTLVTVSSASTKG

SEQ ID NO: 54 - protein, 126 aa, Homo sapiens
EVQLVESGGGVVQPGRSLRLSCAASGFTFSHHGIHWVRQAPGEGLEWVAVISEDGTNIHYEDSVRGRFTISRDNSKNTVDLQMNSLRAEDTAVYYCASLISMRDGDAFDLWGQGTRVTVSSASTKG

SEQ ID NO: 55 - protein, 138 aa, Homo sapiens
QVQLVQSGAEVRKPGSSLKVSCKSSGGTFSRYVVNWVRQAPGQGLEWMGGIIPIFGIAKYAQKFQDRVTMTADESKNTVYLDFSSLRSDDTAVYYCARDRGDTRLLDYGDYEDERYYYGMDVWGQGTTVIVSSASTKG

SEQ ID NO: 56 - protein, 124 aa, Homo sapiens
QVQLVQSGGGLVKPGGSLRLSCAASGFTFSSYSMNWVRQAPGKGLEWVSSISSSSSYIYYADSVKGRFTISRDNAKNSLYLQMNSLRAEDTAVYYCAREGSYYYGMDVWGQGTTVTVSSASTKG

SEQ ID NO: 57 - protein, 130 aa, Homo sapiens
EVQLVQSGGGLVQPGRSLRLSCAASGFTFDDYAMHWVRQAPGKGLEWVSGISWNSGTIGYADSVRGRFTISRDDAKSSLYLQMNSLRTEDTALYYCAKDGWVGSGSSTLRGSDYWGQGTLVTVSSASTKG

SEQ ID NO: 58 - protein, 157 aa, Homo sapiens
QIHLVQSGTDVKKPGSSVTVSCKAYGVNTFGLYAVNWVRQAPGQSLEYIGQIWRWKSSASHHFRGRVLISAVDLTGSSPPISSLEIKNLTSDDTAVYFCTTTSTYDQWSGLHHDGVMAFSSRGQGTLISVSAASTKGPSVFPLAPSSKSTYGLAHVL

SEQ ID NO: 59 - protein, 138 aa, Homo sapiens; identical to SEQ ID NO: 39

SEQ ID NO: 60 - protein, 125 aa, Homo sapiens
QLQLQESGPGLVKPWETLVLTCSVSGGSISSGDYYWGWIRQSPGKGPEWIGNIFYSSGNTYYNTSLKSRVTISVDVSKNRFSLKLTSMTAADTAVYYCGRLSNKGWFDPWGQGTLVSVSSASTKG

SEQ ID NO: 61 - protein, 127 aa, Homo sapiens
QVQLLESGGGLVQRGGSLRLSCTASGFVFNNYWMTWVRQAPGNGLEWVANIDQDGSEKHYLDSVKGRFTISRDNAKNSLYLQMNSLRAEDTAIYYCARVRFKVTAWHRFDSWGQGDLVTVSSTSTKG

SEQ ID NO: 62 - protein, 132 aa, Homo sapiens
LVQLLQSGAEVKKPGASVKVSCKVSGYTLTELSIHWVRQAPGKGLEWMGGFDPEDDEAIYEPKFQGRLTMTEDTSTDTAYMELSSLRSEDTAVYYCATADPFKVAQDEGLYVIFDYWGQGTLVTVSSASTKG

SEQ ID NO: 63 - protein, 126 aa, Homo sapiens
QVQLVESGGGLGQPGGSLRLSCAASGFTFRNYAMSWVRQAAGKGLEWVSGVSGGGDTTYYGDSVKGRFTISRDNSKNTLYLQMNNLRAEDTAVYYCAKDKGVWGSSDFDYWGQGTLVTVSSASTKG

SEQ ID NO: 64 - protein, 132 aa, Homo sapiens
QVHLVQSGAEVKKPGASVRVSCKASGYTFTTYGISWVRQAPGQGLEWMGWISAHSGDTNYAQKLQARVTMTTDTSTNTAYMELRSLTSDDTAVYYCARDRPRHYYDRGGYYSPFDYWGQGTLVTVSSASTKG

SEQ ID NO: 65 - protein, 139 aa, Homo sapiens
QVQLVESGAEVKKPGSSVKVSCKASGGTFNIFAFSWVRQAPGQGLEWMGGIIPIFASPNYAQRFQGRVTITADESTSTVHMELSSLRSEDTAIYYCAKDAHMHIEEPRDYDYIWGTSPYYFDYWGQGTLVTVSSASTKG

SEQ ID NO: 66 - protein, 132 aa, Homo sapiens
QVQLVQSGAEVKKPGASVKVSCKVSGYTLTELSIHWVRQAPGKGLEWMGGFDSEDGEAFYKQNFQGRVTMTEDTSTDTAYMELRRLRSEDTAVYYCATADRFKVAQDEGLFVIFDYWGQGTLVTVSSASTKG

SEQ ID NO: 67 - protein, 132 aa, Homo sapiens
QVQLLQSGGEVKKPGASVKVSCKVSGYTLTELSIHWVRQAPGKGLEWMGGFDPEDDEAIYEPKFQGRLTMTEDTSTDTAYMELSSLRSEDTAVYYCATADPFKVAQDEGLYVIFDYWGQGTLVTVSSASTKG

SEQ ID NO: 68 - protein, 135 aa, Homo sapiens
EVQLVESGGGLVQPGGSLRLSCAASGFTFSSYSMNWVRQAPGKGLEWVSYISGSSYTIYYADSVRGRFTISRDNAKNSLYLQMNSLRDEDTAVYFCARATPPNPLNLYNYDSSGSSFDYWGQGTLVTVSSASTKG

SEQ ID NO: 69 - protein, 138 aa, Homo sapiens
QVQLVQSGAEVRKPGSSLKVSCKSSGGTFSRYVVNWVRQAPGQGLEWMGGMIPIFGIAKYAQKFQDRVTMTADESKNTVYLDFSSLRSDDTAVYYCARDRGDTRLLDYGDYEDERYYYGMDVWGQGTTVIVSSASTKG

SEQ ID NO: 70 - protein, 138 aa, Homo sapiens
QVQLVESGAEVRKPGSSLKVSCKSSGGTFSRYVVNWVRQAPGQGLEWMGGIIPIFGIAKYAQKFQDRVTMTADEPKNTVYLDFNSLRSDDTAVYYCARDRGDTRLLDYGDYEDERYYYGMDVWGQGTTVIVSSASTKG

SEQ ID NO: 71 - protein, 124 aa, Homo sapiens
QVQLVQSGAEIKKPGESLKISCKASGYTFNDYWIGWVRQMPGKGLEWMGIFYPDDSDSNYSPSFQGRVTISADKSITTAYLQWSTLKASDSAMYFCARLLGDSGAFDIWGQGTMVIVSSASTKG

SEQ ID NO: 72 - protein, 138 aa, Homo sapiens
EVQLVESGAEVRKPGSSLKVSCKSSGGTFSRFVVNWVRQAPGQGLEWMGGMIPIFGIAKYAQKFQDRVTMTADESKNTVYLDFSSLRSDDTAVYYCARDRGDTRLLDYGDYEDERYYYGMDVWGQGTTVIVSSASTKG

SEQ ID NO: 73 - protein, 135 aa, Homo sapiens
QVQLVQSGAEVKKPGSSVKVSCKASGGTFSTYAFSWVRQAPGQGLEWMGGIIPIFGTENYAQKFQGRVTITADKSTSTAYMELSSLRSEDTAVYYCARDRSSAIGYCSSISCYKGSFDIWGQGTMVTVSSASTKG

SEQ ID NO: 74 - protein, 138 aa, Homo sapiens
QVQLVQSGAEVRKPGSSLKVSCKSSGGTFSRFVVNWVRQAPGQGLEWMGGMIPIFGIAKYAQKFQDRVTMTADESKNTVYLDFSSLRSDDTAVYYCARDRGDTRLLDYGDYEDERYYYGMDVWGQGTTVIVSSASTKG

SEQ ID NO: 75 - protein, 126 aa, Homo sapiens
QVQLVQSGGGVVQPGRSLRLSCAASGFTFSHHGIHWVRQAPGEGLEWVAVISEDGTNIHYEDSVRGRFTISRDNSKNTVDLQMNSLRAEDTAVYYCASLISMRDGDAFDLWGQGTRVTVSSASTKG

SEQ ID NO: 76 - protein, 133 aa, Homo sapiens
EVQLVQSGGGLVKPGGSLRLSCAASGFTFKNAWMSWVRQAPGKGLEWVGHIKSKTDGGTIDYAAPVKGRFTISRDDSKNTLYLQMNSLKIEDTAVYYCTTDIGSGRGWDFHYYDSNDWGQGTLVTVSSASTKG

SEQ ID NO: 77 - protein, 131 aa, Homo sapiens
EVQLVQSGGGVVQPGRSLRLSCVVSGFTFSSFTFHWVRQAPGKGLEWVAGMSFHATYIYYADSVKGRFTISRDDSQDTLYLEMDSLRSEDTAIYYCARDPGIHDYGDYAPGAFDYWGQGSPVTVSSASTKG

SEQ ID NO: 78 - protein, 132 aa, Homo sapiens
LVQLVQSGAEVKKPGASVKVSCKVSGHTLSELSINWVRHVPGKGLEWMGGLDPEDGEAIHEPKFQGRLTMTEDTSTDTAYSTLSVWAPVAAAMYYCATADPFKVAQDEGLYVIFDYWGQGTLVTVSSASTKG

SEQ ID NO: 79 - protein, 125 aa, Homo sapiens
EVQLVESGAEVKKPGSSVKVSCKASGGTFSSYSISWVRQAPGQGLEWMGGIIPIFATTHYGQKFQGRIKITADKSTSTAYMELSRLRSEDTAVYYCARDREFYFYGMDVWGQGTTVTVSSASTKG

SEQ ID NO: 80 - protein, 131 aa, Homo sapiens
QVQLQQWGAGLLKPSETLSLTCAVYAGSFSGYYWTWIRQPPGKGLEWIGEVNHGGSTNYNPSLKSRVTLSVDTSKNQFSLKLTSVTAADTAVYYCARVSRYDFWSGNYGSYGLDVWGQGTTVTVSSASTKG

SEQ ID NO: 81 - protein, 138 aa, Homo sapiens
VVQLVQSGAEVRKPGSSLKVSCKSSGGTFSRFVVNWVRQAPGQGLEWMGGMIPIFGIAKYAQKFQDRVTMTADESKNTVYLDFSSLRSDDTAVYYCARDRGDTRLLDYGDYEDERYYYGMDVWGQGTTVIVSSASTKG

SEQ ID NO: 82 - protein, 154 aa, Homo sapiens
LVQLVQSGAEVKKPGASVKVSCKVSGYSLTELSIHWVRQAPGKGLEWMGGFDSEDGEAIYKQNFQGRVTMTEDTSTDTAYMELSRLRSEDTAVYYCATADPFKVAQDEGLFVIFDYWGQGTTGHRLLSLHQGPHRLYSLGTLLSRAPIVQTHMA

SEQ ID NO: 83 - protein, 135 aa, Homo sapiens; identical to SEQ ID NO: 73

SEQ ID NO: 84 - protein, 135 aa, Homo sapiens
QVQLVQSGAEVKKPGSSVKVSCKASGGTFSTYAFSWVRQAPIEGLEWMGGIIPIFGTENYAQKFQGRVTITADKSTSTAYMELSSLRSEDTAVYYCARDRSSAIGYCSSISCYKGSFDIWGQGTMVTVSSASTKG

SEQ ID NO: 85 - protein, 132 aa, Homo sapiens
QVQLVQWGAGLLKPLETLSLTCAVYGGSFNGYFWSWIRQTPGKGLEWIGEINHGGSANFNPSLKSRVTMSVDTSKNQFSLKLASVTAADTAIYYCARGRITMVRGDPQRGGVRMDVWGQGTSVTVSSASTKG

SEQ ID NO: 86 - protein, 132 aa, Homo sapiens
QVQLMQSGAEVKRPGASVKVSCKAFRHSLNNLGISWIRRAPGRGLEWLGWINVYEGNTKYGRRFQGRVTMTTDRSTNTVSMELRSLTSDDTAVYYCARDNHFWSGSSRYYYFGMDVWGQGTTVIVSSASTKG

SEQ ID NO: 87 - protein, 125 aa, Homo sapiens
QVQLVQSGGGLVQPGESLRLSCTASGFTFSSYNMNWVRQAPGKGLEWISYISDKSKNKYYADSVRGRFTISRDNAQNSLFLQMSSLRDEDTAVYYCTREGPQRSFYFDYWGQGIQVTVSSASTKG

SEQ ID NO: 88 - protein, 126 aa, Homo sapiens
QVQLQESGPGLVKPSETLSLTCTVSGGSISNHYWSWIRQPPGKGLEWIGYIYHSGNINYKSSLKSRATISIDTSNNQFSLKLSSVIAADTAVYYCARNFGPGSPNYGMDVWGQGTTVTVSSASTKG

SEQ ID NO: 89 - protein, 130 aa, Homo sapiens
VVQLVQSGPGLVKPSQTLSLTCTVSGGSISSGDFYWSWIRQPPGKGLEWIGYIYYSGSTYYNPSLKSRLTISVDTSKNQFSLRLSSVTAADTAVYYCARDLNSRIVGALDAFDIWGQGTMVTVSSASTKG

SEQ ID NO: 90 - protein, 129 aa, Homo sapiens
QVQLVESGGALVQPGGSLRLSCAASGFSFSSYAMSWVRQAPGKGLEWVSAISRSGGSTYYADSVKGRFTISIDNSNNTLYLQMNSLRVEDTAVYYCAKREAFYYGAGGYGMDVWGQGTTVTVSSASTKG

SEQ ID NO: 91 - protein, 130 aa, Homo sapiens
EVQLVESGGGLVKPGGSLRLSCEASGFTFTNAWMNWVRQAPGKGLEWVGRIKSQTHGGTTRYAAPVKGRFTISRDDSKHTLYLQMDRLTTEDTAVYYCTGTITGSTFYYYGMDVWGQGTTVTVSPASTKG

SEQ ID NO: 92 - protein, 132 aa, Homo sapiens
EVQLVESGGGLLQPGGSLRLSCAASGFSFNDFEMNWVRQAPGKGLEWVSYISNDGTMIHYADSVKGRFTISRDNAKKSLFLQMNSLRAEDTAVYYCARLAEVPPAIRGSYYYGMDVWGQGTTVTVASASTKG

SEQ ID NO: 93 - protein, 123 aa, Homo sapiens
QVQLQESGPGLLRPLETLSLTCSVSGGSIRGYFWSWVRQPAGRGLEWIGRIYSSGTTRFNPSLKSRVRLSIDTAKSEVSLNITSVTAADSASYFCAGTSPVHGGLDLWGLGLRVTVSSASTKG

SEQ ID NO: 94 - protein, 135 aa, Homo sapiens
HLVQSGTEVKKPGSSVTVSCKAYGVNTFGLYAVNWVRQAPGQSLEYIGQIWRWKSSASHHFRGRVLISAVDLTGSSPPISSLEIKNLTSDDTAVYFCTTTSTYDQWSGLHHDGVMAFSSWGQGTLISVSAASTKG

SEQ ID NO: 95 - protein, 132 aa, Homo sapiens
EVQLVQSGAEVKKPGASVKVSCKVSGYTLTELSIHWVRQAPGKGLEWMGGFDPEDDEAIYEPKFQGRLTMTEDTSTDTAYMELSSLRSEDTAVYYCATADPFKVAQDEGLYVIFDYWGQGTLVTVSSASTKG

SEQ ID NO: 96 - protein, 129 aa, Homo sapiens
QVQLVESGGGLVQPGGSLRLSCAASGFTFSTHWMHWVRQAPGKGLVWVSRIHSDGRSTSYADSVKGRFTISRDNAKNTLYLQMNSLRAEDTAVYYCARGAAVFGVVIIGGMDLWGQGTTVTVSSASTKG

SEQ ID NO: 97 - protein, 127 aa, Homo sapiens
EVQLVESGGGVVQPGGSLRLSCAASGFMFKNYAMHWVRQPPGKGLEWVAVIWYGGRDQNYADSVKGRFTISRDDSDNTLYLQMNSLRAGDTAVYFCARNSQVGRLMPAAGVWGQGTLVTVSSASTKG

SEQ ID NO: 98 - protein, 123 aa, Homo sapiens
EVQLVESGGGLIQRGGSLRLSCVASGFPVSDNHMSWVRQAPGKGLEWVSIIYSDGGTYYADSVKGRFTISRDNSKNTVYLQMNSLRATDTAVYYCARDPGFHYGLDVWGQGTTVTVSSASTKG

SEQ ID NO: 99 - protein, 124 aa, Homo sapiens
VVQLVESGGGLVQPGGSLRLSCAASGFAFRSYWMSWVRQAPGRGLEWVANIKQDGSEKYYADSVKGRFTISRDNTKNSLYLQMNSLRAEDTAVFYCASRGDRYGPIDYWGQGTLVTVSSASTKG

SEQ ID NO: 100 - protein, 125 aa, Homo sapiens
VVQLVESGTEVKKPGSSVKVSCKASGGTFSGSDISWVRQAPGQGLEWMGGIIPMFDIENHAEKFRGRLTITAVKSTGAAYMELSSLRSEDAAVYYCARSSGNYDFAYDIWGQGTRVIVSSASTKG

SEQ ID NO: 101 - protein, 135 aa, Homo sapiens; identical to SEQ ID NO: 47

SEQ ID NO: 102 - protein, 130 aa, Homo sapiens
EVQLVQSGGGLVQPGGSLRLSCAASGLTFRNFAMSWVRQAPGKGLEWVSSISGSGGSTYYADSVKGRFTISRDNSKNTLYLQMNSLRGEDTAVYFCAKGVGYDILTGLGDAFDIWGQGTVVAVSSASTKG

SEQ ID NO: 103 - protein, 137 aa, Homo sapiens
QIHLVQSGTEVKKPGSSVTVSCKAYGVNTFGLYAVNWVRQAPGQSLEYIGQIWRWKSSASHHFRGRVLISAVDLTGSSPPISSLEIKNLTSDDTAVYFCTTTSTYDKWSGLHHDGVMAFSSWGQGTLISVSAASTKG

SEQ ID NO: 104 - protein, 125 aa, Homo sapiens
VVQLVQSGTEVKKPGSSVKVSCKASGGTFSGSDISWVRQAPGQGLEWMGGIIPMFDIEDHAQKFRGRLTITADKSTGAAYMELSSLRSEDAAVYYCARSSGNYDFAFDIWGQGTRLIVSSASTKG

SEQ ID NO: 105 - protein, 132 aa, Homo sapiens
QVQLGESGGGLVEPGGSLRLSCAASGFLFSDYQMSWIRLAPGKGLEWISFISGFGSVYYADSVEGRFTISRDNARNSLYLQMNNLRAEDTAVYYCARAYGTGNWRGLYYYYYGMDVWGHGTTVTVSSASTKG

SEQ ID NO: 106 - protein, 122 aa, Homo sapiens
QLQLVESGGGVVQPGRSLRLSCAASGFTFSTYTMHWVRQAPGKGLEWVAVISYDGTNKYYADSVKGRFTISRDNSKNTLYLQMNSLRGEDTAVYYCARSPSYYFDYWGQGTLVTVSAASTKG

SEQ ID NO: 107 - protein, 128 aa, Homo sapiens
QVQLVQSGAEVKMPGASVKVSCKVSGYSLTELSIHWVRQAPGKRLEWMGGFDPEDDERIYAQKFQDRVTMTEDTSTDTAYMDLNSLRSEDTAVYYCTTGGLYCSSISCIMDVWGQGTTVIVSSASTKG

SEQ ID NO: 108 - protein, 128 aa, Homo sapiens
QVQLVQSGAEVKKPGASVKVSCKVSGYTLTELSIHWVRQAPGKRLEWMGGFDPEDGERIYAQKFQGRVTMTEDTSTDTAYMELNSLRSDDTAVYYCATGGLYCSSISCIMDVWGQGTTVTVSSASTKG

SEQ ID NO: 109 - protein, 153 aa, Homo sapiens
QVQLVQSGAEVKKPGASVKVSCKVSGYTLTELSIHWVRQAPGKGLEWMGGFDSEDGEAIYKQNFQGRVTMTEDTSTDTAYMELSRLRSEDTAVYYCATADRFKVAQDEGLFVIFDYWGQGNPGHRLLSLHQGPIGLPPGTLPPKATSGHAARR

SEQ ID NO: 110 - protein, 129 aa, Homo sapiens
QVQLVESGGGVVQPGRSLRLSCAASGFTFSSYAMHWVRQAPGKGLEWVAVISYDGSNKYYADSVKGRFTISRDDSKSTVYLQINSLRAADTAVYFCAREGGLRFLEWLFWGQGTLVTVSSGESSASTKG

SEQ ID NO: 111 - protein, 126 aa, Homo sapiens
EFQLVQSGGGLVKPGGSLRLSCTGSTFSFSSDDMNWVRQAPGKGLEWVSSMSDSGSHIYYADFVKGRFTISRDNAKKSLYLQMNSLRAEDTAVYYCAQSRPPQRLYGMDVWGQGTTVTVSSASTKG

SEQ ID NO: 112 - protein, 132 aa, Homo sapiens
QVQLVQSGAEVKKPGASVKVSCKVSGYTLTELSIHWVRQAPGKGLEWMGGFDPEDGEASFEPKFQGRLTMTEDTSTDTAYMELSSLRSEDTAVYYCATADPFKVAQDEGLYVIFDYWGQGTLVTVSSASTKG

SEQ ID NO: 113 - protein, 124 aa, Homo sapiens
QVQLVESGGGVVQPGKSLRLSCAASGFTFSTHAMHWVRQAPGKGLDWVAVISHDGDNQYYADAVKGRFTISRDDSRDTVFLQMNSLRTEDTGVYYCAADSSGSNWFDYWGQGILVTVSSASTKG

SEQ ID NO: 114 - protein, 121 aa, Homo sapiens
EPMFQPGQSGGVVVQSGESLHLSCEASGFKFASQMMHWVRHVPGRGLEWVALISWDGSGKLFADSVRGRFTIHRWNDRNSLYLDVKNVRPEDAAIYYCTRNGFDVWGQGILVTVSSASTKG

SEQ ID NO: 115 - protein, 132 aa, Homo sapiens
QVQLLQSGAEVKKPGASVKVSCKVSGYTLTELSIHWVRQAPGKGLEWMGGFDPEDDEAIYEPKFQGRLTMTEDTSTDTAYMELSSLRSEDTAVYYCATADPFKVAQDEGLYVIFDYWGQGTLVTVSSASTKG

SEQ ID NO: 116 - protein, 131 aa, Homo sapiens
QVHLQESGPRLVRSSETLSLTCSVPGGSIVNPITNYYWSWIRQSPRKGLQWIGDIYYTGTSSRNPSLDSRVSISMDVSRKQISLTLYSVTAADTAVHYCASQSLSWYRPSGYFESWGQGILVTVSSASTKG

SEQ ID NO: 117 - protein, 128 aa, Homo sapiens
QVQLVQSGAEVKKPGSSMKVSCKSSGGTFSNHAISWVRQAPGKGLEWMGGIIPMSGTTNYLQKFQGRVTITADEFATTAYMELSSLTSEDTAVYYCARARADSHTPIDAFDIWGPGTRVIVSSASTKG

SEQ ID NO: 118 - protein, 125 aa, Homo sapiens
QVQLVQSGTEVKKPGSSVKVSCKASGGTFSDSDIAWVRQAPGQGLEWMGGITPMFDMAKSAQKFRGRLIITADKSTGTAYMELSSLRYEDAAVYFCARSSGNFEFAFEIWGQGTKIIVSLASTKG

SEQ ID NO: 119 - protein, 128 aa, Homo sapiens
QVQLVQSGAEVKKPGASVKVSCKASGYTFTSYDINWVRQATGQGLEWMGWMNPNSGNTGYAQTFQGRVTMTRNTSISTAYMELSSLRSEDTAVYYCARDRWLPQYYYYGMDVWGQGTTVTVSSASTKG

SEQ ID NO: 120 - protein, 134 aa, Homo sapiens
FVQLVESGGGLVQPGGSLRLSCAASGFNFNTYWMNWVRQAPGKGLEWVANMKEDGSEKYYVDSVKGRFTISRDNAKNSLYLQMNSLRAEDTAVYYCARNPESRCIVGRNRGWCRYFDLWGRGSLVTVSPASTKG

SEQ ID NO: 121 - protein, 141 aa, Homo sapiens
LVQLVESGGGVVQPGRSLRLSCAASGFTFSTYAMHWVRQAPGKGLEWVAVISYDGSNKFYADSVKGRFTISRDNSKNTLYLQMNSLRAEDTAVYYCARPKFLPGADIVVVVAATPFDYWGQGNPGHRLLSFHQGPIGLPPG

SEQ ID NO: 122 - protein, 120 aa, Homo sapiens
PMFQPGQSGGVVVQSGESLHLSCEASGFKFASQMMHWVRHVPGRGLEWVALISWDGSGKLFADSVRGRFTIHRWNDRNSLYLDVKNVRPEDAAIYYCTRNGFDVWGQGILVTVSSASTKG

SEQ ID NO: 123 - protein, 132 aa, Homo sapiens; identical to SEQ ID NO: 53

SEQ ID NO: 124 - protein, 138 aa, Homo sapiens; identical to SEQ ID NO: 74

SEQ ID NO: 125 - protein, 126 aa, Homo sapiens
LVQLVESGGGVVQPGKSLRLSCATSGFTFSTYGMHWVRQAPGKGLEWVAVIWYDGSYKYYADSVKGRFTISRDNSKNTLFLQMNSLRAEDTAMYYCGREMAVGGTKALDHWGQGTLVTVSSASTKG

SEQ ID NO: 126 - protein, 118 aa, Homo sapiens
QVQLVQSGAEAKRPGDSVKVSCKASGYTFTEYYIHWVRQTPGQGFEWMGIITPGAGNTTYAQKFQGRITVTRDTSAATVYMELSNLTSEDTAVYFCSRGVSFWGQGTLVTVSSASTKG

SEQ ID NO: 127 - protein, 122 aa, Homo sapiens
QVQMVASGGGLVKPGGSLRLSCEASGFTFSDYYMSWVRQAPGKGLEWISYITSGGNALYYADSVKGRFTISRDNAKNSLYLQMNSLRAEDTAVYYCARDLLHAHDFGRQGTLVTVSSASTKG

SEQ ID NO: 128 - protein, 127 aa, Homo sapiens
QVQLVESGGGVVQPGRSLRLSCATSGFTSKNYGVHWVRQAPGKGLEWVAVIWYDGSNKFYADSVKGRFTISRDRSKNMVYLQMNSLRVEDTAIYYCARDSVAFVLEGPIDYWGQGTLVTVSSASTKG

SEQ ID NO: 129 - protein, 129 aa, Homo sapiens
QVQLVQSGAEVKKPGASVKVSCKASGYTFTDYYIHWVRQAPGQGLEWMGWINPSTGGTNFVQKFLGRVTMTSDTSINTAYMELRRLKNDDAAIYYCATYSTRQFFHYYYVTDVWGQGTTVTVSSASTKG

SEQ ID NO: 130 - protein, 134 aa, Homo sapiens
QVQLVQSGAEVKKPGSSVKVSCRASGGSFGNYAINWVRQAPMQGLEWMGGIIPIFGTTNYAQNFRGRVTINADTFTNTVNMDLSSLRSEDTAVYYCGRSINAAVPGLEGVYYYYGMAVWGQGTTVTVSSASTKG

SEQ ID NO: 131 - protein, 134 aa, Homo sapiens
QVQLHQWGAGLLKPSDTLSLTCGILGVSPPGSLTGYYWTWIRQPPGKGLEWIGEVYHSGSTNYNPSLASRVTISMGTTKTQFSLRLTSVTAADSAVYYCASGKVWGITARPRDAGLDVWGQGTTVTVTSASTKG

SEQ ID NO: 132 - protein, 126 aa, Homo sapiens
EVQVVESGGGLVQPGGSLRLSCVASGFTFSEYWMSWVRQAPGKGLEWVATIKRDGSEESYVDSVKGRFTISRDNAKNSLYLQMNSLRAEDTAVYYCARVRDPNYNLHFDSWGQGTLVTVSSASTKG

SEQ ID NO: 133 - protein, 122 aa, Homo sapiens
QVQLVESGGGLIQPGGSLRLSCEASGFAVGDINYMSWVRQAPGKGLEWVSVLYSGGSSQYADSVKGRFTISRDNSRNTLYLQMDNLRAEDTAVYYCARGLRVYFDLWGQGILVTVSSASTKG

SEQ ID NO: 134 - protein, 135 aa, Homo sapiens; identical to SEQ ID NO: 73

SEQ ID NO: 135 - protein, 125 aa, Homo sapiens
QVQLQESGPGLVKPSETLSLTCTVSGGSISSRSYYWGWIRQPPGKGLEWVGSIYYTGSTYYSPSLKSRVTISVDTSQNQFSLKLNSVTAADTAVYYCARQKGSGTSLLYWGQGTLVTVSSASTKG

SEQ ID NO: 136 - protein, 129 aa, Homo sapiens
QVQLVQSGSELKKPGASVKVSCKASGYTFTSYAINWVRQAPGQGLEWMGWINTNTGNPTYAQGFTGRFVFSLETSVSTAYLQINSLKAEDTAVYYCARDLLESRTYYNDIRDCWGQGTLVTVSSASTKG

SEQ ID NO: 137 - protein, 123 aa, Homo sapiens
QVQLQESGSGLVKPSGTLSLTCAVSNGPISSGNWWSWVRQTPEKGLEWIGEVYHSGSTNHNPSLKSRATILVDKSKNQFSLNLRSVTAADTAVYYCARVRGSWNFDYWGQGILVTVSSASTKG

SEQ ID NO: 138 - protein, 159 aa, Homo sapiens [sequence omitted]

SEQ ID NO: 139 - protein, 138 aa, Homo sapiens; identical to SEQ ID NO: 55

SEQ ID NO: 140 - protein, 135 aa, Homo sapiens; identical to SEQ ID NO: 73

SEQ ID NO: 141 - protein, 127 aa, Homo sapiens
QVHLEESGPGLVKTSQTLSLTCSVSSYSISRSGYFWTWIRQRPGKGLEWIGYIYFNGRTTYNPSLKSRITISRDTSHSQFSLTLNSLSAADTAVYYCGRCQDGLASRPIDFWGQGTLVTVSSASTKG

SEQ ID NO: 142 - protein, 127 aa, Homo sapiens
QVQLVESGGGVVQPGKSLRLSCAISGFLFNNYGGQWVRQAPGKGLEWVAAISYDGNNRYYADSAKGRFLISRDTPKNILYLQIYSLRLDDTAVYYCARDSVSKSYSAPPEFWGQGTVVTVSSASTKG

SEQ ID NO: 143 - protein, 134 aa, Homo sapiens
QLQLQESGPGLVKPSETLSLTCSVSDGSINSNSYYWAWIRQSPGKGLEWIGSVYYFGGTYYSPSLKSRVTMSVDRSKNQFSLNVSSVTAADTAIYYCARHVRPYDRSGYPERPNWFDPWGRGTLVTVSSASTKG

SEQ ID NO: 144 - protein, 125 aa, Homo sapiens
RVQLVQSGAEVKKPGSSVTVSCKASGGSFSSYAISWVRQAPGQGLEWVGGVKVMFGTVHYSQKVQGRVTITADDSTGTSYLELSGLRSADTAVYYCARNAGAYFYPFDIWGQGTLIIVSSASTKG

SEQ ID NO: 145 - protein, 136 aa, Homo sapiens
QVQLVQSGAEVKKPGASVKVSCKASGYTFTRYHIHWVRHAPGQGLEWMGKINPSRASTKYAKKFQDRVTMTRDTSTSTVYMELSSLRGDDTAVYYCGREMGTFTLLGVVIDHYDFYPMDVWGQGTPVTVSSASTKG

SEQ ID NO: 146 - protein, 138 aa, Homo sapiens
QVQLVQSGAEVRKPGSSLKVSCKSSGGTFSRYVVNWVRQAPGQGLEWMGGIIPIFGIAKYAQKFQDRVTMTADESKNTVYLDFSSLRSGDTAVYYCARDRGDTRLLDYGDYEDERYYYGMDVWGQGTTVTVSSASTKG

SEQ ID NO: 147 - protein, 127 aa, Homo sapiens
SQHLVQSGTQVKKPGASVRVSCQASGYTFTNYILHWWRQAPGQGLEWMGLIKPVFGAVNYARQFQGRIQLTRDIYREIAFLDLSGLRSDDTAVYYCARDESGDDLKWHLHPWGQGTQVIVSPASTKG

SEQ ID NO: 148 - protein, 127 aa, Homo sapiens
SQQLVQSGTQVKKPGASVRISCQASGYSFTDYVLHWWRQAPGQGLEWMGWIKPVYGARNYARRFQGRINFDRDIYREIAFMDLSGLRSDDTALYFCARDGSGDDTSWHLDPWGQGTLVIVSAASTKG

SEQ ID NO: 149 - protein, 127 aa, Homo sapiens
SQQLVQSGTQVKKPGASVRISCQASGYSFTDYVLHWYRQAPGQGLEWMGWIKPVYGARNYARRFQGRINFDRDIYREIAFMDLSGLRSDDTALYFCARDGSGDDTSWYLDPWGQGTLVIVSAASTKG

SEQ ID NO: 150 - protein, 127 aa, Homo sapiens
SQQLVQSGTQVKKPGASVRISCQASGYTFTDYVLHWWRQAPGQGLEWMGWIKPVYGARNYARRFQGRINFDRDIYREIAYMDLSGLRSDDTARYFCARDGSGDDTSWHLHPWGQGTLVIVSAASTKG

SEQ ID NO: 151 - protein, 127 aa, Homo sapiens
SQQLVQSGTQVKKPGASVRVSCQASGYTFMNYIIHWWRQAPGQRLEWMGWINPVFGARNYAHRFQGRINFDRDINRETFQMELTGLRSDDTAVYYCARDGSGDARDWHLDPWGQGTLVIVSSASTKG

SEQ ID NO: 152 - protein, 127 aa, Homo sapiens
SQHLVQSGTQVKKPGASVRVSCQASGYTFTNYILHWWRQAPGQGLEWMGLIKPVFGAVNYARQFQGRIQLTRDINREIAFLDLSGLRSDDTAVYYCARDESGDDLKWHLHPWGQGTQVIVSPASTKG

SEQ ID NO: 153 - protein, 127 aa, Homo sapiens
SQQLVQSGTQVKKPGASVRVSCQASGYTFMNYIIHWWRQAPGQRLEWMGWINPVFGARNYAHRFQGRINFDRDINRETFQMDLTGLRSDDTAVYYCARDGSGDARDWHLHPWGQGTLVIVSSASTKG

SEQ ID NO: 154 - protein, 127 aa, Homo sapiens; identical to SEQ ID NO: 147

SEQ ID NO: 155 - protein, 127 aa, Homo sapiens
SQQLVQSGTQVKKTGASVRVSCQASGYDFTKYLIHWWRQAPGQGLEWMGWMKPVYGATNYAHRFQGRISFTRDIYREIAFMDLNGLRSDDTAVYFCARDGGGDDRTWLLDAWGQGTLVIVSSASTKG

SEQ ID NO: 156 - protein, 127 aa, Homo sapiens; identical to SEQ ID NO: 152

SEQ ID NO: 157 - protein, 127 aa, Homo sapiens
SQQLVQSGTQVKKPGASVRISCQASGYTFTDYVLHWWRQAPGQGLEWMGWIKPVYGARNYARRFQGRINFDRDIYREIAFLDLSGLRSDDTARYFCARDGSGDDTSWHLHPWGQGTLVIVSAASTKG

SEQ ID NO: 158 - protein, 127 aa, Homo sapiens; identical to SEQ ID NO: 150

SEQ ID NO: 159 - protein, 127 aa, Homo sapiens; identical to SEQ ID NO: 150

SEQ ID NO: 160 - protein, 127 aa, Homo sapiens; identical to SEQ ID NO: 155

SEQ ID NO: 161 - protein, 126 aa, Homo sapiens
SQQLVQSGAQVKKPGASVRVSCQASGYTFTNHFLHWWRQAPRQGLEWMGWINPVHGGRNYARRFQGRINFGRDVYQETAYMELSGLRNDDTATYFCARGGGDGRNWHLHPWGQGTLVIVSAASTKG

SEQ ID NO: 162 - protein, 127 aa, Homo sapiens; identical to SEQ ID NO: 147

SEQ ID NO: 163 - protein, 127 aa, Homo sapiens
SQQLVQSGAQVKKPGASLRVSCQASGYTFMNYLLHWWRQAPGQGLEWMGWINPVYGAVNYAHRFQGRLTFSRDVYREIAYMDLNGLRSDDTAVYFCARDGSGDDRNWHLDPWGQGTLVIVSSASTKG

SEQ ID NO: 164 - protein, 127 aa, Homo sapiens
SQQLVQSGTQVKKPGASVRVSCQASGYTFTNYILHWWRQAPGRGLEWMGLIKPVYGAVNYARQFQGRIQLTRDIYREIAFLDLSGLRPDDTAVYYCARDESGYDLNWHLDSWGQGTQVIVSPASTKG

SEQ ID NO: 165 - protein, 127 aa, Homo sapiens
SQQLVQSGTQVKKPGASVRVSCQASGYTFTDYVLHWWRQAPGQGLEWMGWIKPVYGARNYAHRFQGRINFDRDVYREIAYMDLSGLRSDDTAVYFCARDGSGDATSWHLHPWGQGTLVIVSSASTKG

SEQ ID NO: 166 - protein, 127 aa, Homo sapiens; identical to SEQ ID NO: 151

SEQ ID NO: 167 - protein, 137 aa, Homo sapiens
QVTLVQSGAEVKKPGASVRISCRASGFTFDDYSDYSFIPTTYLIHWFRQAPGQGLEWMAWINSVNGGRNIARQFQGRVTVARDRSNSIAFLEFSGLRHDDTAVYFCARDRRDDDRAWLLDPWGQGTRVTVSSASTKG

SEQ ID NO: 168 - protein, 130 aa, Homo sapiens
QVRLEQSGAAMRKPGASVTLSCQASGYNFVKYIVHWVRQKPGLGFEWVGMIDPYRGRPWSAHKFQGRLSLSRDTSMEILYMTLTSLTSDDTATYFCARAEAASDSHSRPIMFDHWGQGSRVTVSSASTKG

SEQ ID NO: 169 - protein, 130 aa, Homo sapiens
QVRLEQSGTAVRKPGASVTISCQASGYNFVKFFIHWVRQRPGQGFEWVGMIEPFRGRPWSAGNFQGRLSLSRDVSTETLYMTLNNLRSDDTAVYFCARLEAESDSHSRPIMFDHWGHGSLVTVSSASTKG

SEQ ID NO: 170 - protein, 133 aa, Homo sapiens
QVRLFQSGAAMRKPGASVTISCEASGYNFMNYFVHWVRQRPGRGFEWLGMINPRGGRPWSAQSVQGRLTLTRDTSTEMFYMRLDGLRSDDTATYFCARNEADYHDGNGHSLRGMFDYWGQGSLITVSSASTKG

SEQ ID NO: 171 - protein, 130 aa, Homo sapiens
QVRLEQSGAAVRKPGASVTLSCQASGYNFVNYIIHWVRQRPGLDFEWVGMIDPYRGRPWSAHKFQGRLSLSRDVSTEILYMTLSSLRSDDTATYFCARAEAESQSHSRPIMFDFWGQGSRVTVSSASTKG

SEQ ID NO: 172 - protein, 133 aa, Homo sapiens
QVRLSQSGAAIKKPGASVTISCETEGYTFINYIIHWVRQPPGRGFEWLGMIDPRNGRPWFGQSVQGRLSLRRDTYTEVVYMTLSGLTSDDAGHYFCARNEPQYHDGNGHSLPGMFDYWGQGTLVAVSSASTKG

SEQ ID NO: 173 - protein, 133 aa, Homo sapiens
QVRLSQSGAAVKKPGASVTIVCETEGYNFIDYIIHWVRQPPGRGFEWLGMIDPRNGRPWSGQKVHGRLSLWRDTSTEKVYMTLTGLTSDDTGLYFCGRNEPQYHDDNGHSLPGMIDYWGQGTMVTVSSASTKG

SEQ ID NO: 174 - protein, 133 aa, Homo sapiens; identical to SEQ ID NO: 170

SEQ ID NO: 175 - protein, 133 aa, Homo sapiens; identical to SEQ ID NO: 170

SEQ ID NO: 176 - protein, 133 aa, Homo sapiens; identical to SEQ ID NO: 170

SEQ ID NO: 177 - protein, 130 aa, Homo sapiens
QVRLEQSGAAVRKPGASVTLSCQASGYNFVRYIIHWVRQRPGLDFEWVGMIDPYRGRPWSAHKFGGRLSLTRDVSTEILYMTLTSLRSDDTATYFCARAEAESQSHSRPIMFDSWGQGSRVTVSSASTKG

SEQ ID NO: 178 - protein, 130 aa, Homo sapiens
QVRLEQSGNAVRKPGASVTISCQASGYNFVKFFIHWVRQRPGQGFEWVGMIEPFRGRPWSAGNFQGRLSLSRDVSTETLYMTLNNLRSDDTAVYFCARLEAESDSHSRPIMFDHWGHGSLVTVSSASTKG

SEQ ID NO: 179 - protein, 130 aa, Homo sapiens
QVRLEQSGAAMRKPGASVTLSCQASGYNFVKYIIHWVRQKPGLGFEWVGMIDPYRGRPWSAHKFQGRLSLSRDTSMEILYMTLTSLKSDDTATYFCARAEAASDSHSRPIMFDHWGQGSRVTVSSASTKG

SEQ ID NO: 180 - protein, 133 aa, Homo sapiens
QVRLFQSGAAMRKPGASVTISCEASGYNFLNYFVHWVRQRPGRGFEWLGMINPRGGRPWSAQSVQGRLTLTRDTSTEMFYMRLDGLRSDDTATYFCARNEADYHDGNGHSLRGMFDYWGQGSLITVSSASTKG

SEQ ID NO: 181 - protein, 130 aa, Homo sapiens; identical to SEQ ID NO: 179

SEQ ID NO: 182 - protein, 133 aa, Homo sapiens
QVRLSQSGAAIKKPGASVTISCETEGYTFINYIIHWVRQPPGRGFEWLGMIDPRNGRPWFGQSVQGRLSLRRDTYTEVVYMTLSGLTSDDTGLYFCARNEPQYHDGNGHSLPGMFDSWGQGTLVAVSSASTKG

SEQ ID NO: 183 - protein, 133 aa, Homo sapiens
QVQLFQSGAAMRKPGASVTISCEASGYNFMNYFVHWVRQRPGRGFEWLGMINPRGGRPWSAQSVQGRLTLTRDTSTEMFYMRLDGLRSDDTATYFCARNEADYHDGNGHSLRGMFDYWGQGSLITVSSASTKG

SEQ ID NO: 184 - protein, 130 aa, Homo sapiens
QVRLEQSGAAMRKPGASVTLSCQASGYNFVKYIVHWVRQKPGLGFEWVGMIDPYRGRPWSAHKFQGRLSLSRDTSMEILYMTLTSLKSDDTATYFCARAEAASDSHSRPIMFDHWGQGSRVTVSSASTKG

SEQ ID NO: 185 - protein, 133 aa, Homo sapiens
QVRLFQSGAAMKKPGASVTISCEASGYNFMNYFVHWVRQRPGRGFEWLGMINPRGGRPWSAQSVQGRLTLTRDISTEMFYMRLDGLRSDDTATYFCARNEADYHDGNGHSLRGMFDYWGQGSLITVSSASTKG

SEQ ID NO: 186 - protein, 130 aa, Homo sapiens
QVRLEQSGTAMRKPGASVTLSCQASGYNFVKYIVHWVRQKPGLGFEWVGMIDPYRGRPWSAHKFQGRLSLSRDTSMEILYMTLTSLKSDDTATYFCARAEAASDSHSRPIMFDHWGQGSRVTVSSASTKG

SEQ ID NO: 187 - protein, 133 aa, Homo sapiens; identical to SEQ ID NO: 170

SEQ ID NO: 188 - protein, 133 aa, Homo sapiens; identical to SEQ ID NO: 170

SEQ ID NO: 189 - protein, 133 aa, Homo sapiens; identical to SEQ ID NO: 182

SEQ ID NO: 190 - protein, 133 aa, Homo sapiens; identical to SEQ ID NO: 170

SEQ ID NO: 191 - protein, 130 aa, Homo sapiens; identical to SEQ ID NO: 179

SEQ ID NO: 192 - protein, 130 aa, Homo sapiens; identical to SEQ ID NO: 179

SEQ ID NO: 193 - protein, 144 aa, Homo sapiens
QVRLEQSGVAMRKPGASVTLSCQASGYNFVKYIIHWVRQKPGLGFEWVGMIDPYRGRPWSAHKFQGRLSLSRDTSMEILYMTLTSLKSDDTATYFCARAEAASDIHSRPIILTGPGEYGLDLEHMDWTWRILCLLAVAPGCHSQ

SEQ ID NO: 194 - protein, 130 aa, Homo sapiens; identical to SEQ ID NO: 184

SEQ ID NO: 195 - protein, 130 aa, Homo sapiens
QVRLEQSGTAVRKPGASVTISCQASGYNFVKFFIHGVRQRPGQGFEWVGMIEPFRGRPWSAGNFQGRLSLSRDVSTETLYMTLNNLRSDDTAVYFCARLEAESDSHSRPIMFDHWGHGSLVTVSSASTKG

SEQ ID NO: 196 - protein, 129 aa, Homo sapiens
QVRLVQSGPQVKTAGASMRVSCEASGYRFLDYIIVWIRQTHGQHFEYVGMINPRGGTPWPSSKFRDRLTLTRDIYTDTFYLGLNNLGSGDTAIYFCARLEADGDDYSPKMFDYWGQGTRIIVSAASTKG

SEQ ID NO: 197 - protein, 133 aa, Homo sapiens
QVHTFQSGSSMKKSGASVTISCEATGYNIKNYILHWVRQKPGRGFEWVGMIDPINGRPWFGQPFRGRLTLTRDLSTETFYMSLSGLTSDDTATYFCARREADYHDGNGHTLPGMFDFWGPGTLITVSSASTKG

SEQ ID NO: 198 - protein, 129 aa, Homo sapiens
QVSLVQSGPQVKTPGASMRVSCETSGYRFLDYIIVWIRQTHGQHFEYVGMINPRGGTPWPSSKFRDRLTMTRDIHTDTFYLGLNNLRSDDTAIYFCARLEADGDDYSPKMFDYWGQGTRIIVSAASTKG

SEQ ID NO: 199 - protein, 129 aa, Homo sapiens
QVRLVQSGPQMKTPGASLRLSCEVSGYRFLDYFIVWVRQTGGQGFEYVGMINPRGGRPWSSWKFRDRLSLTRDIETDTFYLGLNNLRSDDTAIYFCARLEADGDNYSPKMVDYWGQGTKIIVSPASTKG

SEQ ID NO: 200 - protein, 128 aa, Homo sapiens
QVRLSQSGAAVVKTGASVTISCETEGYNFVNYIIHWVRRPPGRGFEWLGMIDPRNGHPWFAQTVRGRLSLRRDTFKETVYMTLSGLTSDDTGVYFCARNEPQYHSLPGMFDYWGHGTPVTVSSASTKG

SEQ ID NO: 201 - protein, 133 aa, Homo sapiens
QVRLVQSGAQLKKPGASVTVSCEASGYNFVNYIINWVRQTPGRGFEWVGMIDPRRGRPWSAQKFQGRLTLTRDIDSEKLYMHLSGLRGDDTAVYYCARQDSDFHDGHGHTLRGMFDSWGQGSPVTVSSASTKG

SEQ ID NO: 202 - protein, 129 aa, Homo sapiens
QVRLVQSGPQVKTPGASMRISCEASGYRFQDYIIVWIRQTHGQGFEYVGMINPRGGTPWSSSKFRDRLSLTRDIYTDTFYLGLNNLGSDDTAIYFCARLEADGGDYSPKMFDYWGQGTRIIVSAASTKG

SEQ ID NO: 203 - protein, 133 aa, Homo sapiens; identical to SEQ ID NO: 170

SEQ ID NO: 204 - protein, 129 aa, Homo sapiens
QVRLVQSGPQVKRPGASIRLSCETSGYRFQDYIVAWIRQTRGQRFEFVGMVNPRGGRPWPSSKFRDRVTLTRDIESETFHLGLNDLTSDDTATYFCARLEADGADYSPKMFDFWGQGTKIVVSPASTKG

SEQ ID NO: 205 - protein, 130 aa, Homo sapiens
QVRLEQSGAAVRKPGASVTLSCQASGYNFVNYIIHWVRQRPGLDFEWVGMIDPYRGRPWSAHKFEGRLSLSRDVSTEVLYMTLSSLRSDDTATYFCARAEAESQSHSRPIMFDYWGQGSRVTVSSASTKG

SEQ ID NO: 206 - protein, 130 aa, Homo sapiens; identical to SEQ ID NO: 179

SEQ ID NO: 207 - protein, 128 aa, Homo sapiens
QVRLSQSGAAVMKTGASVTISCETEGFNFVNYIIHWVRRPPGRGFEWLGMIDPRNGHPWFAQTVRGRLSLRRDTFNEIVYMTLSGLTTDDTGLYFCARNEPQYHSLPGMFDYWGQGTPVTVSSASTKG

SEQ ID NO: 208 - protein, 133 aa, Homo sapiens
QVRLSQSGAAMKKPGASVTISCETEGYTFINYIIHWVRQPPGRGFEWLGMIDPRNGRPWFGQSVQGRLSLRRDTYTEVVYMTLSGLTSDDAGLYFCARNEPQYHDGNGHSLPGMFDYWGQGTLVAVSSASTKG

SEQ ID NO: 209 - protein, 133 aa, Homo sapiens
QVRLSQSGAAVVKTGASVTISCETEGYTFVNYIIHWVRQSPGRGFEWLGMIDPRNGHPWFGQRLRGRLSLRRDRSTETVFMTLSGLTSDDTAIYFCARNEPQYYDGSGHSLPGMFDYWGQGTRVVVSSASTKG

SEQ ID NO: 210 - protein, 133 aa, Homo sapiens; identical to SEQ ID NO: 170

SEQ ID NO: 211 - protein, 129 aa, Homo sapiens
QVRLVQSGPQVKTPGASIRLSCEASGYRFLDYFIVWVRQTPGQGFEYVGMINPRGGRPWSSWKFRDRLSLTREIDTDTFYLGLSNLRSDDTAIYFCARLEADGDDYSPKMVDYWGQGTKIIVSAASTKG

SEQ ID NO: 212 - protein, 133 aa, Homo sapiens; identical to SEQ ID NO: 170

SEQ ID NO: 213 - protein, 117 aa, Homo sapiens
QVRLEQSGAAVRTPGASVTLSCQASGYKFVNYIIHWVRQRPGLAFEWVGMIDPYRGRPWSAHSFEGRLSLSRDVSMEILYMTLTSLRSDDTATYFCARAEAESQSHSRPIISTSGAR

SEQ ID NO: 214 - protein, 133 aa, Homo sapiens
QVQFFQSGSSMKKSGASVTISCEATGYNIKNHILHWVRQKPGRGFEWVGMIDPINGRPWFGQAFRGRLTLTRDLSTETFYMSLSGLTSDDTATYFCARREADYHDGNGHTLPGMFDFWGPGTLVTVSSASTKG

SEQ ID NO: 215 - protein, 133 aa, Homo sapiens
QVRLSQSGAAVVKTGASVTISCETEGYTFVNHIIHWVRQPPGRGFEWLGMIDPRNGHPWFGQRLRGRLSLRRDRSTETVFMTLSGLTSDDIGIYFCARNEPQYFDGSGHSLPGMFDYWGQGTRVVVSSASTKG

SEQ ID NO: 216 - protein, 133 aa, Homo sapiens
QVRLSQSGAAVVKTGASVTISCETEGYTFVNYIIHWVRQPPGRGFEWLGMIDPRNGHPWFGQRLQGRLSLRRDRSTETVFMTLSGLTSDDTGIYFCARNEPQYYDGSGHSLPGMFDYWGQGTRVVVSSASTKG

SEQ ID NO: 217 - protein, 129 aa, Homo sapiens
QVRLVQSGPQVKTPGASMRVSCEASGYRFLDYIIVWIRQTHGQHFEYVGMINPRGGTPWPSSKFRDRLSLTRDIHTDTFYLGLNNLGSDDTAIYFCARLEADGDDYSPKMFDHWGQGTRIIVSAASTKG

SEQ ID NO: 218 - protein, 130 aa, Homo sapiens
QVRLEQSGAAVKKPGASVTISCQASGYNFVKFFIHWVRQRPGQGFEWVGMIEPYRGRPWSAGNFQGRLSLSRDVSTETLYMTLNNLRSDDTAVYFCARLEAESDSHSRPIMFDHWGHGSLVTVSSASTKG

SEQ ID NO: 219 - protein, 133 aa, Homo sapiens
QVRLSQSGAAVMKTGASVTISCETEGYNFVNYIIHWVRRPPGRGFEWLGMIDPKNGHPWFAQAVRGRLSLRRDTFNEVVYMTLSGLTSDDTGLYFCARNEPQYHDGNGHSLPGMFDFWGQGTLVTVSSASTKG

SEQ ID NO: 220 - protein, 133 aa, Homo sapiens
QVRLSQSGAAVVKTGASVTISCETEGYTFVNYIIHWVRQPPGRGFEWLGMIDPRNGHPWFGQRFRGRLSLRRDRSTETVFMTLSGLTSDDNGIYFCARNEPQYYDGSGHSLPGMFDYWGQGTRVVVSSASTKG

SEQ ID NO: 221 - protein, 130 aa, Homo sapiens; identical to SEQ ID NO: 171

SEQ ID NO: 222 - protein, 130 aa, Homo sapiens
QVRLEQSGAAVRKPGASVTLSCQASGYNFVNYIIHWVRQRPGLDFEWVGMIDPYRGRPWSAHKFQGRLSLSRDVSTEILYMTLNSLRSDDTATYFCARAEAESQSHSRPIMFDSWGQGSRVTVSSASTKG

SEQ ID NO: 223 - protein, 133 aa, Homo sapiens; identical to SEQ ID NO: 170

SEQ ID NO: 224 - protein, 130 aa, Homo sapiens
QVRLEQSGGALRKPGASVTLSCQASGYNFVKYIIHWVRQRPGLGFEWVGMIDPYRGRPWYAHSFAGRLSLSRDTSTETLYMTLSSLKSDDTATYFCARAEAASDSHSRPIMDWTWRILCLLAVVPASTKG

SEQ ID NO: 225 - protein, 133 aa, Homo sapiens; identical to SEQ ID NO: 170

SEQ ID NO: 226 - protein, 130 aa, Homo sapiens; identical to SEQ ID NO: 184

SEQ ID NO: 227 - protein, 129 aa, Homo sapiens
QVRLVQSGPQVKRPGASIRLSCESSGYRFQDYIVAWIRQTRGQGFEFVGMVNPRGGRPWPSSRFRDRVTLTRDIESETFYLGLNDLTSDDTATYFCARLEADGSDYSPKMFDFWGQGTKIVVSPASTKG

SEQ ID NO: 228 - protein, 133 aa, Homo sapiens
QVRLVQSGAQLKKPGASVTVSCEASGYNFVNYIINWVRQTPGRSFEWVGMIDPRRGRPWSAQKFQGRLTLTRDIDSEKLYMHLSGLRGDDTAVYYCARQDSDFHDGHGHTLRGMFDSWGQGSPVTVSSASTKG

SEQ ID NO: 229 - protein, 132 aa, Homo sapiens
QVQLVQSGPELMKPGSSVKVSCRASGDNFLTSTFNWLRQAPGQRLEWMGRFIPSLGLITSAPKFSDRLTITADQATLTAYMELTGLTSEDTALYYCARGLCRGGNCRLGPSGWLDPWGRGTQVTVSSASTKG

SEQ ID NO: 230 - protein, 126 aa, Homo sapiens
QVVLIQSGAEVKRPGSSVKVSCKASGGSFPITWVRQAPGHGLEWMGGINPFFGTTNYAQKFQGRVSITADESTSTTYLHLSDLRSEDTAVYFCARENREKWLVLRSWFAPWGQGTLVTVSSASTKG

SEQ ID NO: 231 - protein, 123 aa, Homo sapiens
EESGPGLVKPSQTLSLTCSVSGDSVSSGGYFWSWIRQHPTKGLECLGYVYYTGNTYYNPSLKSPPTIEVAMANNQVSLKLGSVTAADTAVYYCARIKRFRGGNYFDTWGHGLLVTVSSASTKG

SEQ ID NO: 232 - protein, 150 aa, Homo sapiens
LAQLEQSGGGVVKPGGSLRLPCAASGFTFIDYYMAWIRLAPGKGLEWLSYISKNGDYTKYSESLKGRFTISRDNAKNLVILQLNRLRADDTAIYFCARADGLTYFGELLQYIFDLWGQGARVIVSSASTKGPSVFPLAPSSKSTSGHASV

SEQ ID NO: 233 - protein, 128 aa, Homo sapiens
QVQLVQSGAEVKKPGASVKISCKASGYSFRNYAVHWVRQAPGQGLEWMGEINGGNGNTEYSQKSQGRLTITRDISATTAYMELSSLRSDDTAVYYCARVAYVHVVTTRSLDNWGQGTLVTVSSASTKG

SEQ ID NO: 234 - protein, 139 aa, Homo sapiens
QVQIRQSGPGLVKPLETLSLSCIVFGGSFIAYHWTWIRQAPLKGLEWIGDIDQGGDITYSPSLKSRVTMSVDRSKSQFSLKLSSVTAADAAVYYCVRGPPNRYAVTSFTSGTHRERSSYYFDYWGPGTLVTVSSASTKG

SEQ ID NO: 235 - protein, 118 aa, Homo sapiens
KAPATLSLSPGERATLSCRASQSVGSDLAWYQQKPGQAPRLLIYDASNRATAIPARFSGSGSGTDFTLSISSLEPEDFAVYFCQQRYDKITFGQGTRLEIQRTVAAPSVFIFPPSDEQ

SEQ ID NO: 236 - protein, 121 aa, Homo sapiens
FVQLVESGGGVVQPGTSLRLSCTTSGFIFSDYGMHWVRQAAGKGLEWVAVIWHDGSNRFYADSVKGRFTISRDNSKNAVYLEMNNLRVEDTALYYCARTSMDIDYWGQGTPVTVSSASTKG

SEQ ID NO: 237 - protein, 132 aa, Homo sapiens
QVYLVQSGPELKKPGASVKISCKASGYNFPKYAIHWVRQAPGQGLQWMGWINGDNGDARYSQKLQGRVTPSTDTSASVVYMELKRLRSEDTAVYYCARALYPWEIGGVPSTMGDDYWGQGTLITVSSASTKG

SEQ ID NO: 238 - protein, 130 aa, Homo sapiens
QVHLQQWGAGLLKPSETLSLTCAVSGGSFSGFFWTWIRQSPGKGLEWIGEVNHSGFTHSNPSLESRATISVAASNTQFSLRLASVTAADTAIYFCALRYFDWSPFRRDTYGTDVWGQGTTVIVSSASTKG

SEQ ID NO: 239 - protein, 132 aa, Homo sapiens
QVQLVQSGAELKKPGSSVKVSCKASGGTFNNHTFNWVRQAPGQGLEWMGRTIPILGSRDYAKTFQDRVTIIADKSTSTVYLELRRLKSEDTGVYYCATSMYYFDSGGYYRNTDLDKWGQGSLVTVSSASTKG

SEQ ID NO: 240 - protein, 133 aa, Homo sapiens
GLDLEHDGHHKEEPRASVTVSCEASGYNFVNYIIHWVRLTPGRGFEWMGMIDPRRGRPWSAQKFQGRLTLTRDIDSERLYMQLSGLRGDDTAVYFCARQEPDFHDGHGHTLRGMFDSWGQGSPVSVSSASTKG

SEQ ID NO: 241 - protein, 124 aa, Homo sapiens
QVQLVQSGAELKKPGSSVKVSCKASGGTFSNYAINWVRQAPGQGFEWMGGIIPLFATPTYAQKFQGRVRITADDSTSTAYMELSSLRSDDTAVYFCARPNVVRSALDYWGQGTLVTVSSASTKG

SEQ ID NO: 242 - protein, 129 aa, Homo sapiens
QARLDQWGTGLLKPSETLSLKCAVFGVLFTDYNWTWVRQSPGKGLEWIGHLDHRGGGNYNPSLESRVTISLDYSKAQFSLHLKSVTVADTALYYCAGAVKGFWFDEVYNWFGPWSQGTLVTVASASTKG

SEQ ID NO: 243 - protein, 146 aa, Homo sapiens
QVQLQESGPGLVKPSGTLSLTCAVSGASISSRNWWTWVRQPPGKGLEWIGEIYESGATNYNPSLKSRVTISVDKSKNQFSLRLTSVTAADTAVYFCARLMTFGGLIGTLDYWGQGTLVTVLQPPPRAHRYHPRNLLQEHLCARVMP

SEQ ID NO: 244 - protein, 141 aa, Homo sapiens
QVQLVQSGAEVKKPGSSVKVSCKASGGTFSTYAISWVRQAPGQGLEWMGGIIPSFSMSNYAQDFQGRLTITADESTSSVYMELNSLRSEDTAVYYCARDFPRFHRLVGNYDFWRGTLDRFSYMDLWGRGTAVTVSSASTKG

SEQ ID NO: 245 - protein, 132 aa, Homo sapiens
QVHLVQSGAEAKRPGSSVRVSCRASGGDFSSYTLSWVRQAPGQGIEWMGGVVPMLDTVHYAQKFQGRLTLSVDEGTSTAYMELSSLRSEDTAMYYCTRGRQTFRAIWSGPPAVFDIWGQGTLVIVSSASTKG

SEQ ID NO: 246 - protein, 141 aa, Homo sapiens
NGGSLRLSCRVSGFGFHLYEMNWVRQAPGKGLEWISSISGSGESTHYSDSITGRFSMSRDEAKDSLYLQMNNLRVEDTAVYYCTRGFSMGDGTGFSFDTWGRGTMVTVSSGLDTVSLASTKGPSVFPLAPCSRSTSDARLS

SEQ ID NO: 247 - protein, 149 aa, Homo sapiens
AARLDQWGTGLVKPSETLSLKCAVFGVDFPDYTWTWARQAPGKGLEWIGHRDHRGGSSYNPSLSGRATISLDTSKAQFSLHIKSVTVADTATYYCAGAVAGLWFEDAYNWFGPWSQGTLVTVAAASTKGPSVFPLAPSSKSTSGHASVL

SEQ ID NO: 248 - protein, 149 aa, Homo sapiens
QARLDQWGTGLLKPSETLSLKCAVFGVLFTDYNWTWVRQSPGKGLEWIGHLDHRGGGNYNPSLESRVTISLDYSKAQFSLHLKSVTVADTALYYCAGAVKGLWFDETYTWFGPWSQGTRVTVASASTKGPSVFPLAPSSKSTSGTRDLS

SEQ ID NO: 249 - protein, 129 aa, Homo sapiens
QVQLVQSEAEVKKPGSSVKVSCKASGGTFRGYTISWVRQAPGQGLEWMGRIIPILGKAIYAPSFQGRVTLTADKSTGTAYMELSRLRSDDTAVYYCAKVKMRGSSGYYYLFDDWGQGTLVTVSSASTKG

SEQ ID NO: 250 - protein, 122 aa, Homo sapiens
QVHLVQSGAEVKKPGASVKVSCKVSGYTLSELSIHWVRQGPGRGLEWMANFDPEDGETIYAPQFQGRVTLTEDTSTDTAYMQLTSLRSEDTAVYYCATDRYTDTGRWGPGTLVTVSSASTKG

SEQ ID NO: 251 - protein, 129 aa, Homo sapiens
QARLDQWGTGLLKPSETLSLKCAVFGVLFTDYNWTWVRQSPGKGLEWIGHLDHRGGGSYNPSLESRVSISLDYSKAQFSLHLKSVTVADTALYYCAGAVKGFWFDEPSTWFGPWSQGTMVTVASASTKG

SEQ ID NO: 252 - protein, 149 aa, Homo sapiens
QARLDQWGTGLLKPSETLSLKCAVFGVLFTDYNWTWVRQSPGKGLEWIGHLDHRGGGNYNPSLESRVTISLDYSKAQFSLHLKSVTVADTALYYCAGAVKGFWFDEVYNWFGPGVREPWLPSPQPPPRAHRSSPWHPPPRAPLVTATVP

SEQ ID NO: 253 - protein, 129 aa, Homo sapiens
QARLDQWGTGLLKPSETLSLKCAVFGVLFTDYNWTWVRQSPGKELEWIGHLDHRGGGNYNPSLESRVTISLDYSKAQFSLHLKSVTVADTARYYCAGAVKGFWFDDPYTWFGPWSQGTLVTVASASTKG

SEQ ID NO: 254 - protein, 132 aa, Homo sapiens
QVHLVQSGAEAKRPGSSVRVSCRASGGDFSSYTLSWVRQAPGQGLERMGGVVPMLDTVHYAQKFQGRLTLSVDEGTSTAYMELSSLRSEDTAMYYCTRGRQTFRAIWSGPPVVFDIWGQGTLVSVSSASTKG

SEQ ID NO: 255 - protein, 125 aa, Homo sapiens
QFRLVQSGPEVKNPGSSVTVSCKASGGTFSGLGINWVRQAPGQGLEWLGDIKTMYGTTNYAPKFQGRVTITADESTSTSYMELSGLRSEDTAVFYCVRELFGHHPAFGVWGQGTSVIVSSASTKG

SEQ ID NO: 256 - protein, 124 aa, Homo sapiens
QVQLVQSGAEVKKPGASVKVSCKASGYTFTNYGVSWVRQAPGQGLEWMGWISPYSGNTNYAQRLQDRVTMTTDTSTNTAYMELRSLRSDDTAVYYCAARSYYYYSMDVWGQGTTVTVSSASTKG

SEQ ID NO: 257 - protein, 133 aa, Homo sapiens
QVQLVQSGADVKKPGASVKVSCKVSGYTVSELSIHWVRQAPGKGLEWMGGFDPEDGKTVSAQNFQGRVTMTEDKSTGTANMELRSLRSEDTAVYYCATTVQLIVDFCNGGPCYNFDDWGQGTLVTVSSASTKG

SEQ ID NO: 258 - protein, 128 aa, Homo sapiens
QVQLVQSGAEVKKPGSSVKVSCKASGGTLSSYTISWVRQAPGQGLEWMGRLIPLVDITTYAQKFQGRVTITADTSTNTAYMELSNLRSEDTAIYHCATSTMIAAVINDAFDLWGQGTTVTVSSASTKG

SEQ ID NO: 259 - protein, 125 aa, Homo sapiens
QVQLVQSGAEVKKPGASVKVSCKASGNTFTSYGITWVRQAPGQGLEWMGWISAYNGNTNYAQKLQDRLTMTTDTSTSTAYMELRSLRSDDTAVYYCAFSRHYGSGNYDYWGQGTLVTVSSASTKG

SEQ ID NO: 260 - protein, 125 aa, Homo sapiens
QVQLQQWGAGLLKPSETLSLTCAVYGGSFSGYYWSWIRQPPGKGLEWIGEINHSGSTNYNPSLKSRVTISVDTSKNQFSLKLSSVTAADTAVYYCARLPIGSGWYGRDYWGQGTLVTVSSASTKG

SEQ ID NO: 261 - protein, 129 aa, Homo sapiens
  misc_feature (19)..(19): Xaa can be any naturally occurring amino acid
  misc_feature (90)..(90): Xaa can be any naturally occurring amino acid
EVQLLESGGGLVRPGGSLXLSCSASGFTFNSYAMSWVRQAPGKGLEWVSSVSASGEMTYYADSVRGRFTISRDNANNALHLQMNSLRAEXTAVYYCAKVGGTVWSGYSNYLDYWGPGTLVTVSSASTKG

SEQ ID NO: 262 - protein, 125 aa, Homo sapiens
QVQLVQSGAEVKKPGASVKVSCKPSSNTFTSHYIHWVRQAPGQGLEWMGMINPGGSTRYAPKFQGRVTLTRDTSTRTVYMELSSLRSEDTAVYYCARPQYNLGRDPLDVWGLGTMVTVSSASTKG

SEQ ID NO: 263 - protein, 124 aa, Homo sapiens
EVQLVESGGGLVKPGGSLRLSCADSGFTFRSYSMHWVRQAPGKGLAWVSSISSTSNYIYYADSVKGRFTISRDNAKNSLYLQMNSLRAEDTAVYYCARTFITASWFDSWGQGTLVTVSSASTKG

SEQ ID NO: 264 - protein, 104 aa, Homo sapiens
VSGGRFSNYGLSWVRQAPGQGLEWMGRIVPAINRAKYAQKFQGRVILTADKITDTAYMELRSLRSEDTAIFYCARDPQIEIRGNAFDIWGQGTVVTVSSASTKG

SEQ ID NO: 265 - protein, 128 aa, Homo sapiens
QVQLQESGPGLVKPSGTLSLTCNVYGGSMISYYWSWIRQPPGKGLEWIGHVYNSGNTKYSPSLKNRVTISMDTSRNLFSLKVTSVTPADTAVYYCARADYDNIWDSRGGFDLWGQGTLVTVSSASTKG

SEQ ID NO: 266 - protein, 130 aa, Homo sapiens
QVQLVQLLQSGAEVKKPGSSVKVSCQISGYGFSNYAISWVRQAPGQGLEWLGRIVPAVGMTEYAQKFQGRVTFTADRSTITAYMDLRGLRSDDTAVYYCVRDPQVEVRGNAFDIWGQGTMVTVSSASTKG

SEQ ID NO: 267 - protein, 126 aa, Homo sapiens
QVQLVQSGAEMKKPGASVKVSCKASGHTFTNYYMHWVRQAPGQGLEWMGMINPTGDSTRYAQRFQGRVTMTRDTSTRTVYMELSSLRSDDTAVYYCARAHHDFWRAPVDVWGKGTTVTVSSASTKG

SEQ ID NO: 268 - protein, 130 aa, Homo sapiens
EVQLVQSGAEVKKPGESLRISCKTSGYNFNDDWIAWVRQRPDKGPEWMGIFYPGDSQATYSPSFQGHVTFSADTSISTAYLQWTSLKASDTAIYYCARTRCFGANCFNFMDVWGKGTALTVTVSSASTKG

SEQ ID NO: 269 - protein, 125 aa, Homo sapiens
QVQLQESGPGPVKPSETLSLTCTVSGGSMISYYWSWIRQPPGKGLEWIGYIFTNGRTTYSPSLRSRVTISLDTSTNHFSLRLKSVTAADTAIYYCARLDGEAFRYYLDLWGQGNLVTVSSASTKG

SEQ ID NO: 270 - protein, 99 aa, Homo sapiens
IRSFYWHWIRQSPGKGLEWLGSVFDNGLTTHNPSLKSRLTISEDPSRNQISLKLRSMTAADTAVYYCARGDYDILTSSYQFDYWGQGTLVAVSSASTKG

SEQ ID NO: 271 - protein, 127 aa, Homo sapiens
QVQLQESGPGLVKPSETLSLTCTVFGASIRSFYWHWIRQSPGKGLEWLGSVFDNGLTTYNPSLKNRLSISEDPSRNQISLNLRSMTAADTAVYYCARADYDLLTSSYHFDSWGQGTLVTVSSASTKG

SEQ ID NO: 272 - protein, 125 aa, Homo sapiens
QVQLQESGPGLVKPSETLSLTCTVSGGSISYYYWSWIRQPPGKGLEWIGDIYYSGTTDYNPSLKSRVTISVDTSKNQFSLKLSSVTAADTAVYYCARRRGQRLLAYFDYWGQGSLVTVSSASTKG

SEQ ID NO: 273 - protein, 127 aa, Homo sapiens
QVQLVQSGAEVKKPGASVKVSCKAPGYTFIGHYMHWIRQAPGQGLEWMGWINPNSGDTNYAQTFQGRVTMTRDTSISTAYMELTRLRSDDTAVYYCARDLRPMRGNWAMHVWGEGTTVTVSSASTKG

SEQ ID NO: 274 - protein, 106 aa, Homo sapiens
CTVSGGSISSAGYYWTWIRQHPGKGLEFIGYIYYIGTTYYNPSLKSRLTISIDTSKNQFSLKLSSVTAADTAIYYCARDYTARGRHFFDYWGQGALVTVSSASTKG

SEQ ID NO: 275 - protein, 98 aa, Homo sapiens
SSFAISWVRQAPGQGLEWMGGIIPIFEATSYAQKFQDRLTITTDESTTTAYMDLSSLRSEDTAVYYCARAQGDILTEGYFDYWGQGTLVTVSSASTKG

SEQ ID NO: 276 - protein, 125 aa, Homo sapiens
QVQLVQSGAEVKKPGSSVKVSCKVSFFSNYGISWVRQRPGQGLEWMGRIIPAIDDMTYAQTFRGRVTFSADKFTTTAYMELTGLTFEDTATYFCARDPQVNRRGNCFDHWGQGTLVTVSSASTKG

SEQ ID NO: 277 - protein, 83 aa, Homo sapiens
LEWMGRIIPAIDDVTYAQTFRGRVTFSADKFTTTAYMDLTGLRSEDTATYFCARDPQVNRRGNCFDHWGQGTLVTVSSASTKG

SEQ ID NO: 278 - protein, 126 aa, Homo sapiens
QVQLVQSGAEVKKPGAAVKISCKASRFTFSSYYIHWVRQAPGQGLEWMGIINPSGGSTSNAQKFQDRVTLTRDMSTGTVYMELSRLTSEDTAVYYCATPEPSSIVAPLYYWGQGTLVTVSSASTKG

SEQ ID NO: 279 - protein, 125 aa, Homo sapiens
EVQLLESGGGLVQPGGSLRLSCAVSGFTFGGHAVSWVRQAPGKGLEWLSQISGTGSRTDYADAVKGRFTVSRDNSKKTVYLQMNSLRVEDTALFYCATRSPGGGYAFDIWGQGAMVTVSSASTKG

SEQ ID NO: 280 - protein, 127 aa, Homo sapiens
QVQLQESGPGLVKPSETLSLTCTVSGGSISSAGYYWSWIRQHPEKGLEFIGYIYYLGTTYYNPSLKSRVSISIDTSNNQFSLELSSVSAADTAIYYCARDYTASGRHFFDYWGQGTLVTVSSASTKG

SEQ ID NO: 281 - protein, 124 aa, Homo sapiens
EVQLLESGGALVQPGGSLRLSCAASGFTFSTSSMSWVRQAPGKGLEWVSAIGSGRGSTFYADSVKGRFTISRDNSKNTLSLQMNSLTAEDTATYYCTKTGGLLRFPEVWGKGTTVTVSSASTKG

SEQ ID NO: 282 - protein, 127 aa, Homo sapiens
QVQLVQSGAEVKKPGSSVKVSCKASGGTFSNYAISWVRQAPGQGLEWMGGIIPIFEAASYAQKFQDRLTITTDESTTTAYMDLSSLRSEDTAIYYCARAQGDILTEGYFDYWGQGTLVTVSSASTKG

SEQ ID NO: 283 - protein, 126 aa, Homo sapiens
QVQLQESGPGLVKPSETLSLTCTVSGGSISTYYWSWIRQPPGKGLEWIGYISYSGSTNYNPSLKSRVTISVDTSKNQFSLKLSSVTAADTAVYYCARHKSVLLWFRELDYWGQGTLVTVSSASTKG

SEQ ID NO: 284 - protein, 126 aa, Homo sapiens
QVQLVQSGAEVKKPGSSVKVSCKTSGVRFSSNAISWVRQAPGQGLEWMGRTTPMLGGANHAPSFKGRVTISADESTRTVYMEMSSLRYEDTAVYYCASGRREGLNFLLDYWGQGTLVTVSSASTKG

SEQ ID NO: 285 - protein, 128 aa, Homo sapiens
QVQLVQSGAEVRKPGASVKVSCKTSGYTFTNSYIHWVRQAPGQGLEWMGIINPPGGNTYYAQKFHGRVTLTRDTSTSTVYMELNSLRSEDTAVYFCARPHSPTNIPSRPLDYWGQGTLVTVSSASTKG

SEQ ID NO: 286 - protein, 130 aa, Homo sapiens
QVQLVQSGAEVKKPGASVKVSCKVSGYPLAELSVHWVRQVPGKGLEWVGGFDPEEGKTVYAQKFQGRVTMTEDRSTDTVYMELISLRYEDTAVYYCATDNPVLQLGELSSSLDYWGQGTLVTVSSASTKG

SEQ ID NO: 287 - protein, 115 aa, Homo sapiens
PSETLSLTCRVSGASISNFYWTWIRQPAGKGLEWIGRLYSSDKTNYNPSLNGRVTMSLDTSKNQFSLRLTSMTDADTAIYYCAREKGQWVTLPPYYFDSWGQGILVTVSSASTKG

SEQ ID NO: 288 - protein, 99 aa, Homo sapiens
NTFTSHYVHWVRQAPGQGLEWMGMINPGGTTRYAPKFQDRVTLTRDTSTRTVYMELRSLRSEDTAVYYCARPQYNLGREPLNVWGQGTMVTVSSASTKG

SEQ ID NO: 289 - protein, 128 aa, Homo sapiens
QVQLQESGPGLVKPSETLSLTCSVSGASISNFYWTWIRQPAGKGLEWVGRLYSSDRTNYNPSLNGRVTMSLDTSKNQFSLRLTSMTDADTAIYFCAREKGQWLTVPPYYFDSWGQGILVTVSSASTKG

SEQ ID NO: 290 - protein, 104 aa, Homo sapiens
CTVSGGSIISYYWNWIRQSPGKGLEWLGYIFDGGRANYNPSLRSRLTMSVDTSKNQISLKVKSVTAADSAIYYCARLDGEAFRYYFDSWGQGTLVTVSSASTKG

SEQ ID NO: 291 - protein, 112 aa, Homo sapiens
QTLSLTCSVSGGSISSAGYYWGWIRQHPGKGLEWIGHIYYSGNTNYNPSLKSRLSMSVETSKNQFSLNLASVTAADTAVYFCARDYSAAGRHLFDSWGQGILVTVSSASTKG

SEQ ID NO: 292 - protein, 115 aa, Homo sapiens
KPSQTLSLTCTVSGGSISSAGYYWTWIRHHPGKGLEFIGYIYHIGTPYYNPSLKSRLTISIDTSKNQFSLKLSSVTAADTAIYYCARDYTARGRHFFDYWGQGALVTVSSASTKG

SEQ ID NO: 293 - protein, 128 aa, Homo sapiens
QVQLVQSGADVKKPGASVTVSCKTDEDEDDFRAHLVQWMRQAPGQRLEWVGWIKPQTGQPSYAQKFQGRVTLTREVSTSTVFLQLRNLRSDDTAVYYCARPRGGRDNWSFHVWGRGTLVTVSSASTKG

SEQ ID NO: 294 - protein, 126 aa, Homo sapiens
QVQLVQSGAAVKKPGASVKVSCETYGYTFTDHFMHWWRQAPGQGLEWMGWINPYSSAVSYSPRYQGRVTMTRDTFLETVYMELRGLKFDDTAIYYCATPKSGRDYWSFDLWGQGTLVTVSSASTKG

SEQ ID NO: 295 - protein, 126 aa, Homo sapiens
QVQLVQSGAAVKKPGASVKVSCETYGYKFTDHFMHWWRQAPGQGLEWMGWINPYSSAVSYSPRYQGRVTMTRDTFLETVYMELRGLRFDDTAIYYCATPKSGRDYWSFDLWGQGTLVTVSSASTKG

SEQ ID NO: 296 - protein, 126 aa, Homo sapiens
QVQLVQSGAAVKKPGASVKVSCEAYGYKFTDHFMHWWRQAPGQGLEWMGWINPYTSAVNYSPKYQGRVTMTRDTFLETVYMELRGLRVDDTAIYYCATPKSGRDYWSFDLWGQGTLVTVSSASTKG

SEQ ID NO: 297 - protein, 125 aa, Homo sapiens
QVQLQESGPGLVKPSETLSLTCSVSNGSISSGGYYWSWLRQFPGKGLEWIGSIHYTGRTMYNPSLMGRPALSMDTSNNQFSLKLRSVTAADTALYFCARDLQWIFVVDPWGQGTLVTVSSASTKG

SEQ ID NO: 298 - protein, 144 aa, Homo sapiens
LQQLQVPRLSMWRVFKVAAATGAQTLTVEEPGSSVKVSCKASGGSSTAYGYSWVRQAPGQGFEWMGRIIPFYGIITYAPKFQGRVTITADRSTSTVYMELTSLTFADTALFFCARDFGDPRNGYYFDSWDQGLWLTVSSASTKG

SEQ ID NO: 299 - protein, 132 aa, Homo sapiens
QVHLVQSGAEVKKPGSSVRVSCKASGWTFGDSVNSAITWVRQAPGQGLEWMGRFIPILGLSNYAQKFQDRVTINVDRSTNTAYMELSGLRSEDTAVYYCARLITGMNAPWFYYMDVWGKGTTITVSSASTKG

SEQ ID NO: 300 - protein, 138 aa, Homo sapiens
FICFSVVVRLLEFGGRLVQPGGSLRLSCSASGFTFSNSAMSWVRQAPGKGLEWVSSILSSGVGTFYADSVKGRFTVSRDNSRNTLYLQMKSLRAEDTALYYCAKVQIQQLNFGVITDAGLDVWGKGTTLIVSSASTKG

SEQ ID NO: 301 - protein, 127 aa, Homo sapiens
QVQLGQSGTEVKKPGFSVKVSCKASGGSSTAYGYSWVRQAPGQGFEWMGRIIPFYGIITYAPKFQGRVTITADRSTSTVYMELTSLTFADTALFFCARDFGDPRNGYYFDSWDQGLWLTVSSASTKG

SEQ ID NO: 302 - protein, 127 aa, Homo sapiens
QVQLVQSGGEVRKPGSSVKVPCKISGNAFSNYGVNWVRQAPGQGLEWVGRIIPVIGVAQHAPKFQGRVTITADKSTTTAYLELSSLRSDDTAVYFCAKDHGDPRTGYYFDYWGQGALVTVSSASTKG

SEQ ID NO: 303 - protein, 132 aa, Homo sapiens
QVQLLQSGTEVKKPGSSVKVSCRASGWTLGNSPNSAIGWVRQAPGQGLEWIGRIIPILDVTNYAQKFQGRVTISADKSTNIAYMEISSLGSEDTAFYYCARVITGMTSPWYFYMDVWGEGTTVIVSSASTKG

SEQ ID NO: 304 - protein, 134 aa, Homo sapiens
VQSQVYLVQSGGEVKKPGSSVKVSCKASGDSFSSSVITWVRQAPGQGPEWMGRIIPVLGVAAYAQNFYGRVTISADTSSNTAYMELSSLRFEDTAVFYCARETGRGGNLALRQYFFDSWGQGTLVTVSSPSTKG

SEQ ID NO: 305 - protein, 123 aa, Homo sapiens
EVQLVESGGGLVQPGGSLRISCSATGFTFSTHAMHWVRQAPGKGLEYVSAINSNGRSAFYADSVKGRVTISRDNSKNTLFLQMTSLRAEDTAVYYCVKGPLLRYLDSWGQGTLVTVSSASTKG

SEQ ID NO: 306 - protein, 130 aa, Homo sapiens
QVQLVESGGGLVKPGGSLRLSCAASGFSFNEYYMSWIRQAPGQGLEWVANIGSSDAYTIYADSVKGRFTISRDNAENTVYLQMNSLRGEDTAVYYCARIEGYCSNSRCSNYFDPWGQGALVTVSSASTKG

SEQ ID NO: 307 - protein, 145 aa, Homo sapiens
MFLFLVAGATGVQSQVYLVPFGPEVKKPGSSVKVSCKASGDSFTSSVITWVRQAPGQGPEWMGRVIPVLGVAAYAQKFYGRVTITADTSSNTAYMEVNSLRFEDTAVYYCARETGRGGNLALRQYFFDSWGQGTLVTVSSPSTKG

SEQ ID NO: 308 - protein, 133 aa, Homo sapiens
CQVQLVESGGGVVQPGRSLRLSCVGSGFTFSSSGMHWVRQAPGKGLEWVAVISSDGSDEYYGDSVEGRFTISRDNSKNTLFLQLDSLEAEDSAVYYCAKTPPHYDALTGYPSSVLEFWGLGTLVTVSSASTKG

SEQ ID NO: 309 - protein, 123 aa, Homo sapiens; identical to SEQ ID NO: 305

SEQ ID NO: 310 - protein, 132 aa, Homo sapiens; identical to SEQ ID NO: 299

SEQ ID NO: 311 - protein, 126 aa, Homo sapiens
SGGRLVQPGGSLRLSCSASGFTLSNSAMSWVRQAPGKGLEWVSSILSSGVGTFYADSVKGRFTVSRDNSRNTLYLQMKSLRAEDTALYYCAKVQIQQLNFGVITDAGLDVWGKGTTLIVSSASTKG

SEQ ID NO: 312 - protein, 132 aa, Homo sapiens
EVQLVQSGAEVKKPGSSVKVSCKASGGTFTTYDISWVRQAPGQGLEWIGGILPDFGAPSYAQKFQDRVTITTDESSRTAYMELNSLRSEDTAIYYCARGRGDDFWSGESPSWYFDYWGQGTQVTVSSASTKG

SEQ ID NO: 313 - protein, 135 aa, Homo sapiens
PLVQLEPSGVEVKKRGASVKVSCKVSGYSLTELSMHWVRQAPGKGLEWMGSFDPLDGDTIYAQKFQGRVTMTVDTSTDTAYMDLSSLRFEDTAVYYCATPSKAYYYDSPNYEGDFYMDVWGKGTTVIVSSASTKG

SEQ ID NO: 314 - protein, 132 aa, Homo sapiens
QVQLVESGGGVVQPGRSLRLSCVGSGFTFSSSGMHWVRQAPGKGLEWVAVISSDGSDEYYGDSVEGRFTISRDNSKNTLFLQLDSLEAEDSAVYYCAKTPPHYDALTGYPSSVLEFWGLGTLVTVSSASTKG

SEQ ID NO: 315 - protein, 136 aa, Homo sapiens
EVQLVQSGAEVKKPGASVKVSCKVSGYTLTELSMHWVRQAPGKGLEWMGVFDPLEGDGVYAEKFRGRVIMTEDTSTDTGYMELTSLRSEDTAIYYCATKAKDYYYESSDYSPYYYYYMDVWGKGTTVTVSSASTKG

SEQ ID NO: 316 - protein, 132 aa, Homo sapiens
EVRLLESGGGLVQPGGSLRLSCSASGFTFSNSALSWVRQAPGKGLEWVSSVVSSGGDTFYADSVKGRFTISRDNSRNTLYLQMKSLRAEDTALYYCAKVQIQQLNFGVITDAGMDVWGKGTTVIVSSASTKG

SEQ ID NO: 317 - protein, 117 aa, Homo sapiens
VEEPGSSVKVSCKASGGSSTAYGYSWVRQAPGQGFEWMGRIIPFYGIITYAPKFQGRVTITADRSTSTVYMELTRLTFADTALFFCARDYGDPRNGYYFDSWDQGLWLTVSSASTKG

SEQ ID NO: 318 - protein, 123 aa, Homo sapiens
QVQLVESGGGLVQPGGSLRISCSATGFTFSTHAMHWVRQAPGKGLEYVSAINSNGRSAFYADSVKGRVTISRDNSKNTLFLQMTSLRAEDTAVYYCVKGPLLRYLDSWGQGTLVTVSSASTKG

SEQ ID NO: 319 - protein, 125 aa, Homo sapiens
QVQLVQSGPGLVKPSETLSLTCSVSNGSISSGGYYWSWLRQFPGKGLEWIGSIHYTGRTFYNPSLMGRTALSMDTSNNQFSLKVSSVTAADTALYYCARELQWMFVVDPWGQGTLVTVSSASTKG

SEQ ID NO: 320 - protein, 132 aa, Homo sapiens; identical to SEQ ID NO: 303

SEQ ID NO: 321 - protein, 136 aa, Homo sapiens
QVQLVQSGGEVKKPGASVKVSCKVSGYSLTELSMHWVRQAPGKGLEWMGVFDPLEGDGVYVQKFRGRVIMTEDTSTDTAYMELTSLRSEDTAIYYCATKAKDYYYESSDYSPYYYYYMDVWGKGTTVTVSSASTKG

SEQ ID NO: 322 - protein, 136 aa, Homo sapiens
GSEVQLVESGAEVKKRGASVKVSCKVSGYSLTELSMHWVRQAPGKGLEWMGSFDPLDGDTIYAQKFQGRVTMTVDTSTDTAYMDLSSLRFEDTAVYYCATPSKAYYYDSPNYEGDFYMDVWGKGTTVIVSSASTKG

SEQ ID NO: 323 - protein, 126 aa, Homo sapiens
SVVQLVESGPGLVKPSETLSLTCSVSNGSISSGGYYWSWLRQFPGKGLEWIGSIHYTGRTMYNPSLMGRPALSMDTSNNQFSLKLRSVTAADTALYFCARDLQWIFVVDPWGQGTLVTVSSASTKG

SEQ ID NO: 324 - protein, 134 aa, Homo sapiens
SVDERLLEFGGRLVQPGGSLRLSCSASGFTFSNSAMSWVRQAPGKGLEWVSSILSSGVGTFYADSVKGRFTVSRDNSRNTLYLQMKSLRAEDTALYYCAKVQIQQLNFGVITDAGLDVWGKGTTLIVSSASTKG

SEQ ID NO: 325 - protein, 133 aa, Homo sapiens
QLQLKESGPGMVKPSETLSLTCSVSGASVVSANDYWGWIRQAPGKGLECIGIILYTGSTFYNPSLQSRVTISRDPSKNHVSLTLTSVTAADSAVYYCARIPYHSESYYNVVIGGFDVWGQGTRVTVSSASTKG

SEQ ID NO: 326 - protein, 132 aa, Homo sapiens; identical to SEQ ID NO: 299

SEQ ID NO: 327 - protein, 127 aa, Homo sapiens; identical to SEQ ID NO: 301

SEQ ID NO: 328 - protein, 126 aa, Homo sapiens
SQVQLVESGPGLVKPSETLSLTCSVSNGSISSGGYYWSWLRQFPGKGLEWIGSIHYTGRTMYNPSLMGRPALSMDTSNNQFSLKLSSVTAADTALYFCARDLQWIFVVDPWGQGTLVTVSSASTKG

SEQ ID NO: 329 - protein, 134 aa, Homo sapiens
RVHSQVQLVESGPGLVKPSQTLSLTCTVSGGSISNGGHYWNWIRQHPGKGLEWIGHIYNIATTYYNPSLKSRVSISVDTSKNQFSLKLSSVTAADTAVYYCARGSGRWTIGARIYFDNWGQGALVAVSSASTKG

SEQ ID NO: 330 - protein, 127 aa, Homo sapiens; identical to SEQ ID NO: 302

SEQ ID NO: 331 - protein, 131 aa, Homo sapiens
QVHLVQSGAEVKKPGSSVRVSCEASGWTFGSVNSAITWVRQAPGQGLEWMGRTIPFLGISNYAQKFQGRVTITADKSTNIAYVDVTSLTSQDTAVYYCARLITGMTAPWFYYMDVWGKGTTVTVSSASTKG

SEQ ID NO: 332 - protein, 130 aa, Homo sapiens
EVQLVQSGSDVKKPGTTVTISCKADEDEDDFTAYNYFMHWVRQAPGQGLEWIGWINPRTGQPNHAKQLQGRVTLTRERSTSTVFMKLTNLRLDDTAVYFCARPLRGGDTWHYHSWGRGTSLIVSSASTKG

SEQ ID NO: 333 - protein, 136 aa, Homo sapiens
QSQVHLVQSGAEVKKPGSSVKVSCQASGGTFNTFAINWVRQAPGQGLEWVGGIIPVFGTASYAQKFQGRVTVTTDESRGTAYMELNSLRSEDTAVYYCARGQTDLNDDLWSDYSTPGFDYWGQGTLVTVSSASTKG

SEQ ID NO: 334 - protein, 128 aa, Homo sapiens
RVQLGQSGAEVKKPGASVKVSCKVSGNSLTEFSIHWVRQAPGKGLEWMGGFDPEEGETVPAQKFKGRVTMTEDTSTNTAYMELSSLRSEDTAVYYCSTEPREMGTLTAGFEYWGQGTLVIVSSASTKG

SEQ ID NO: 335 - protein, 132 aa, Homo sapiens
QPQLVQSGSGAEVKKPGASVRISCEASEYNVFDHFMQWVRQAPMEGLEWMGWINPRGGYPSYSPTFQGRLTFTRQPSWDDSTITFHMELRGLRHDDTAVYYCARPHSPDDAWSLDVWGRGTLVTVSSASTKG

SEQ ID NO: 336 - protein, 136 aa, Homo sapiens
LQPRVHSEVQLVESGAEVKKPGASVKVSCKVSGYTLSDLSMHWVRQAPGKGLEWMGGFDEEDGEITYAQKFQGRVSMTEDTSRDTAYMELSSLRSEDTAVYYCATAPRLELGELSSGFHYWGLGTLVTVSSASTKG

SEQ ID NO: 337 - protein, 128 aa, Homo sapiens; identical to SEQ ID NO: 334

SEQ ID NO: 338 - protein, 136 aa, Homo sapiens
IWAPLIAVTFLVLHCESLGTCCCCQASGGTFNTFAINWVRQAPGQGLEWVGGIIPVFGTASYAQKFQGRVTVTTDESRGTAYMELNSLRSEDTAVYYCARGQTDLNDDLWSDYSTPGFDYWGQGTLVTVSSASTKG

SEQ ID NO: 339 - protein, 129 aa, Homo sapiens
EVQLVESGAEVKKPGASVKVSCKVSGYTLSDLSMHWVRQAPGKGLEWMGGFDEEDGEITYAQKFQGRVSMTEDTSRDTAYMELSSLRSEDTAVYYCATAPRLELGELSSGFHYWGLGTLVTVSSASTKG

SEQ ID NO: 340 - protein, 129 aa, Homo sapiens
EVQLVESGAEVKKPGASVKVACKVSGKKLSDLSIHWVRQAPGKGLEWMGGFDEEDGKISYERKFQGRVTMTEDTARDTAFMEMSSLRSDDTAVYFCAAAPRLDLGELSSGFHFWGLGTLVSVSSASTKG

SEQ ID NO: 341 - protein, 136 aa, Homo sapiens
CNPRVHSEVQLVESGAEVKKPGASVKVACKVSGKKLSDLSIHWVRQAPGKGLEWMGGFDEEDGKISYERKFQGRVSMTEDTARDTAFMEMSSLRSDDTAVYFCAAAPRLDLGELSSGFHFWGLGTLVTVSSASTKG

SEQ ID NO: 342 - protein, 128 aa, Homo sapiens
EVQLVESGAEVKKPGASVKVSCKVSGNSLTEFSIHWVRQAPGKGLEWMGGFDPEEGETVPAQKFKGRLTMTEDTSTNTAYMELSSLRSEDTAVYYCSTEPREMGTLTAGFEYWGQGTLVTVSSASTKG

SEQ ID NO: 343 - protein, 125 aa, Homo sapiens
  misc_feature (18)..(18): Xaa can be any naturally occurring amino acid
QVQLQESGPGLVKPSETXSLTCSVSNGSISSGGYYWSWLRQFPGKGLEWIGSIHYTGRTMYNPSLMGRPALSMDTSNNQFSLKLSSVTAADTALYFCARDLQWIFVVDPWGQGTLVTVSSASTKG

SEQ ID NO: 344 - protein, 132 aa, Homo sapiens
QVQLVQSGAEVKKPGSSVKVSCKASGGTFTTYDISWVRQAPGQGLEWMGGILPDFGAPSYAQKFQDRVTITTDESSSTAYMELNSLRSEDTAIYYCARGRGDDFWSGESPSWYFDYWGQGTLVTVSSASTKG

SEQ ID NO: 345 - protein, 133 aa, Homo sapiens
GYSEVQLVQSGPGLVKPSQTLSLTCTVSGGSISNGGHYWNWIRQHPGKGLEWIGHIYNIATTYYNPSLKSRVSISVDTSKNQFSLKLSSVTAADTAVYYCARGSGRWTIGARIYFDNWGQGALVAVSSASTKG

SEQ ID NO: 346 - protein, 128 aa, Homo sapiens
QVQLVQSGADVKKPGATVTVSCKTDEDEDDFRAHLMQWMRQAPGQRLEWVGWIKPQTGQPSYGQKFQGRVTLTREVSTSTVFLQLRNLRSDDTAVYYCARPRGGRDNWSFHVWGRGTLVTVSSASTKG

SEQ ID NO: 347 - protein, 128 aa, Homo sapiens; identical to SEQ ID NO: 293

SEQ ID NO: 348 - protein, 126 aa, Homo sapiens; identical to SEQ ID NO: 294

SEQ ID NO: 349 - protein, 126 aa, Homo sapiens; identical to SEQ ID NO: 294

SEQ ID NO: 350 - protein, 126 aa, Homo sapiens; identical to SEQ ID NO: 295

SEQ ID NO: 351 - protein, 126 aa, Homo sapiens; identical to SEQ ID NO: 295

SEQ ID NO: 352 - protein, 126 aa, Homo sapiens; identical to SEQ ID NO: 294

SEQ ID NO: 353 - protein, 126 aa, Homo sapiens; identical to SEQ ID NO: 296

SEQ ID NO: 354 - protein, 126 aa, Homo sapiens
QVQLVQSGGAVKKPGASVKVSCETYGYTFTDHFMHWWRQAPGQGLEWMGWINPYSSAVSYSPRYQGRVTMTRDTFLETVYMELRGLKFDDTAIYYCATPKSGRDYWSFDLWGQGTLVTVSSASTKG

SEQ ID NO: 355 - protein, 128 aa, Homo sapiens; identical to SEQ ID NO: 293

SEQ ID NO: 356 - protein, 128 aa, Homo sapiens; identical to SEQ ID NO: 293

SEQ ID NO: 357 - protein, 128 aa, Homo sapiens
QVQLLQSGAAVTKPGASVRVSCEASGYNIRDYFIHWWRQAPGQGLQWVGWINPKTGQPNNPRQFQGRVSLTRHASWDFDTFSFYMDLKALRSDDTAVYFCARQRSDYWDFDVWGSGTQVIVSSASTKG

SEQ ID NO: 358 - protein, 127 aa, Homo sapiens
QVQLLQSGAAVTKPGASVRVSCEASGYNIRDYFIHWWRQAPGQGLQWVGWINPKTGQPNNPCQFQGRVSLTRHASWDFDTFSFYMDLKALRSDDTAVYFCARQRSDYWDFDVWGSGTQVTVSSASTK

SEQ ID NO: 359 - protein, 128 aa, Homo sapiens
QVQLLQSGAAVTKPGASVRVSCEASGYNIRDYFIHWWRQAPGQGLQWVGWINPKTGQPNNPCQFQGRVSLTRQASWDFDTISFYMDLKALRLDDTAVYFCARQRSDYWDFDVWGSGTQVTVSSASTKG

SEQ ID NO: 360 - protein, 128 aa, Homo sapiens
QVRLLQSGAAVTKPGASVRVSCEASGYEIRDYFIHWWRQAPGQGLQWVGWINPKTGQPNNPRQFQGRVSLTRQASWDFDSYSFYMDLKALRSDDTAVYFCARQRSDYWDFDVWGSGSQVTVSSASTKG

SEQ ID NO: 361 - protein, 128 aa, Homo sapiens
QVRLLQSGAAVTKPGASVRVSCEASGYEIRDYFIHWWRQAPGQGLQWVGWINPKTGQPNNPRQFQGRVSLTRQASWDFDSYSFYMDLKALRSDDTGVYFCARQRSDYWDFDVWGSGTQVTVSSASTKG

SEQ ID NO: 362 - protein, 128 aa, Homo sapiens
QVRLLQSGAAVTKPGASVRVSCEASGYEIRDYFIHWWRQAPGQGLQWVGWINPKTGQPNNPRQFQGRVSLTRQASWDFDSYSFYMDLKALRSDDTAVYFCARQRSDYWDFDVWGSGTQVTVSSASTKG

SEQ ID NO: 363 - protein, 128 aa, Homo sapiens
QVHLSQSGAVVTKPGASVRVSCEASGYKISDHFIHWWRQAPGQGPQWVGWINPKTGQPNNPRQFQGRISLTRQASWDFDTFSFYMDLKALRSDDTAVYFCARHRSDYWDFDVWGSGTQVTVSSASTKG

SEQ ID NO: 364 - protein, 128 aa, Homo sapiens
QVHLSQSGAAVTKPGASVRVSCEASGYKISDHFIHWWRQAPGQGLQWVGWINPKTGQPNNPRQFQGRISLTRQASWDFDTFSFYMDLKALRSDDTAVYFCARQRSDYRDFDVWGSGTQVTVSSASTKG

SEQ ID NO: 365 - protein, 128 aa, Homo sapiens
QVHLSQSGAAVTKPGASVRVSCEASGYKIRDYSIHWWRQAPGQGLQWVGWINPQTGQPNIPRPFQGRISLTRQASWDFDTFSFYMDLEALRSDDTAVYFCARQRSDYWDFDVWGSGTQVTVSSASTKG

SEQ ID NO: 366 - protein, 128 aa, Homo sapiens
QVHLSQSGAVVTKPGASVRVSCEASGYKISDHFIHWWRQAPGQGLQWVGWINPKTGQPNNPRQFQGRISLTRQASWDFDTFSFYMDLEALRSDDTAVYFCARQRSDYWDFDVWGSGTQVTVSSASTKG

SEQ ID NO: 367 - protein, 128 aa, Homo sapiens
QVHLSQSGAVVTKPGASVRVSCEASGYKISDHFIHWWRQAPGQGLQWVGWINPKTGQPNNPRQFQGRISLTRQASWDFDTFSFYMDLKALRSDDTAVYFCARHRSDYWDFDVWGSGTQVTVSSASTKG

SEQ ID NO: 368 - protein, 128 aa, Homo sapiens
QVHLSQSGAAVTKPGASVRVSCEASGYKISDHFIHWWRQAPGQGLQWVGWINPKTGQPNNPRQFQGRVSLTRQASWDFDTYSFYMGLKAVRSDDTAIYFCARQRSDFWDFDVWGSGTQVTVSSASTKG

SEQ ID NO: 369 - protein, 128 aa, Homo sapiens
QVHLSQSGAAVTKPGASVRVSCEASGYKISDHFIHWWRQAPGQGLQWVGWINPKTGQPNNPRQFQGRISLTRQASWDFDTFSFYMDLKALRSDDTAVYFCARHRSDYWDFDVWGSGTQVTVSSASTKG

SEQ ID NO: 370 - protein, 128 aa, Homo sapiens
QVHLSQSGAVVTKPGASVRVSCEASGYKISGHFIHWWRQAPGQGLQWVGWINPKTGQPNNPRQFQGRISLTRQASWDFDTFSFYMDLKALRSDDTAVYFCARHRSDYWDFDVWGSGTQVTVSSASTKG

SEQ ID NO: 371 - protein, 128 aa, Homo sapiens
QVHLSQSGAVVTKPGASVRVSCEASGYKISDHFIHWWRQAPGQGLQWVGWINPKTGQPNIPRQFQGRISLTRQASGDFDTFSFYMDLKALRSDDTAVYFCARQRSDYWDFGVWGSGTQVTVSSASTKG

SEQ ID NO: 372 - protein, 128 aa, Homo sapiens
QVHLSQSGAVVTKPGASVRVSCEASGYKISDHFIHWWRQAPGQGLQWVGWINPKTGQPNNPRQFQGRISLTRQASWDIDTFSFYMDLKALRSDDTAVYFCARHRSDYWDFDVWGSGTQVTVSSASTKG

SEQ ID NO: 373 - protein, 128 aa, Homo sapiens
QVHLSQSGAVVTKPGASVRVSCEASGYKISDHFIHWWRQAPGQGLQWVGWINPKTGQPNNPRQFQGRISLTRQASWDFDTFSFYMDLKALRSDDTAVYFCARQRSDYWDFDVWGSGTQVTVSSASTKG

SEQ ID NO: 374 - protein, 128 aa, Homo sapiens
QVHLSHSGAAVTKPGASVRVSCEASGYKISDHFIHWWRQAPGQGLQWVGWINPKTGQPNNPRQFQGRISLTRQASWDFDTFSFYMDLKALRSDDTAVYFCARQRSDYWDFDVWGSGTQVTVSSASTKG

SEQ ID NO: 375 - protein, 128 aa, Homo sapiens; identical to SEQ ID NO: 367

SEQ ID NO: 376 - protein, 128 aa, Homo sapiens; identical to SEQ ID NO: 367

SEQ ID NO: 377 - protein, 128 aa, Homo sapiens; identical to SEQ ID NO: 369

SEQ ID NO: 378 - protein, 130 aa, Homo sapiens; identical to SEQ ID NO: 332

SEQ ID NO: 379 - protein, 132 aa, Homo sapiens
QPQLVQSGSGAEVKKPGASVRISCEASEYNVFDHFMQWVRQAPGQGLEWMGWINPRGGYPSYSPRFQGRLTFTRQPSWDDSSVTFHMELRGLRHDDTAVYYCARPHSPDDAWSLDVWGRGTLVTVSSASTKG

SEQ ID NO: 380 - protein, 130 aa, Homo sapiens
EVQLVQSGSDVRKPGATVTVSCKADEDEDDFTAYNYFMHWVRQAPGHGLEWIGWINPRTGQPNHAKQFQGRVTLTRERSTSTVFMKLTNLRLDDTAVYFCARPLRGGDTWHYHSWGRGTSLTVSSASTKG

SEQ ID NO: 381 - protein, 128 aa, Homo sapiens
HVQLLQSGAAVTKPGASVRVSCEASGYNIRDYFIHWWRQAPGQGLQWVGWINPKTGQPNNPRQFQGRVSLTRQASWDFDTFSFYMDLKALRLDDTAIYFCARQRSDYWDFDVWGSGTQVTVSSASTKG

SEQ ID NO: 382 - protein, 130 aa, Homo sapiens
VVQLVQSGSDVRKPGATVTVSCKADEDEDDFTAYNYFMHWVRQAPGHGLEWIGWINPRTGQPNHAKQFQGRVTLTRERSTSTVFMKLTNLRLDDTAVYFCARPLRGGDTWHYHSWGRGTSLTVSSASTKG

SEQ ID NO: 383 - protein, 124 aa, Homo sapiens
QVQLVQSGAALKKPGASLRISCQAYGYKFTDYLIHWWRQAPGQGLEWIGWIKPETGQPSYSYKFQGRVSLTRDTFEEILFMDLRGLRSDDTAIYFCARRHSDYCDFDVWGGGSQVLVSSASTKG

SEQ ID NO: 384 - protein, 124 aa, Homo sapiens
QVQLVQSGTAVKKPGASVRVSCQASGYTFTDYFIYWWRQAPGQGLEWLGWINPRTSQPSYPYRFQGRVTLTRDIFEEMLYMDLRGLRSDDTGIYFCARRHSDYCDFDIWGSGTQIIVSSASTKG

SEQ ID NO: 385 - protein, 130 aa, Homo sapiens; identical to SEQ ID NO: 380

SEQ ID NO: 386 - protein, 130 aa, Homo sapiens; identical to SEQ ID NO: 380

SEQ ID NO: 387 - protein, 128 aa, Homo sapiens
QVQLLQSGAAVTKPGASVRVSCEASGYNIRDYFIHWWRQAPGQGLQWVGWINPKTGQPNNPRQFQGRVSLTRHASWDFDTFSFYMDLKALRSDDTAVYFCARQRSDYWDFDVWGSGTQVTVSSASTKG

SEQ ID NO: 388 - protein, 132 aa, Homo sapiens
QPQLVQSGSGAEVKKPGASVRISCEASEYNVFDHFMQWVRQAPGQGLEWMGWINPRGGYPSYSPTFQGRLTFTRQPSWDDSTITFHMELRGLGHDDTAVYYCARPHSPDDAWSLDVWGRGTLVTVSSASTKG

SEQ ID NO: 389 - protein, 130 aa, Homo sapiens
EVQLVESGSDVRKPGATVTVSCKADEDEDDFTAYNYFMHWVRQAPGQGLEWIGWINPRTGQPNHAKQFQGRVTLTRERSTSTVFMKLTNLRLDDTAVYFCARPLRGGDTWHYHSWGRGTSLTVSSASTKG

SEQ ID NO: 390 - protein, 124 aa, Homo sapiens
QVQLVQSGAALKKPGASLRISCQAYGYKFTDHLIYWWRQAPGQGLEWIGWIKPETGQPSYSYKFQGRVSLTRDTFQEILFMNLRGLRSDDTAIYFCARRHSDYCDFDVWGSGSQILVSSASTKG

SEQ ID NO: 391 - protein, 130 aa, Homo sapiens; identical to SEQ ID NO: 380

SEQ ID NO: 392 - protein, 130 aa, Homo sapiens; identical to SEQ ID NO: 382

SEQ ID NO: 393 - protein, 124 aa, Homo sapiens
QVQLVQSGAALKKPGASVRISCQAYGYKFTDHLIYWWRQAPGQGLEWIGWIKPETGQPSYSYKFQGRVTLTRDTFEEIHFMDLRGLRYDDTATYFCARRHSDYCDFDVWGSGSQVSVSSASTKG

SEQ ID NO: 394 - protein, 130 aa, Homo sapiens
QVQLVQSGSDVRKPGATVTVSCKADEDEDDFTAYNYFMHWVRQAPGHGLEWIGWINPRTGQPNHAKQFQGRVTLTRERSTSTVFMKLTNLRLDDTAVYFCARPLRGGDTWHYHSRGRGTSLTVSSASTKG

SEQ ID NO: 395 - protein, 132 aa, Homo sapiens; identical to SEQ ID NO: 335

SEQ ID NO: 396 - protein, 124 aa, Homo sapiens
QVQLVQSGATLKKPGASVRISCQAYGYKFTDHLIHWWRQAPGQGLEWIGWIKPETGQPSYAYKFQGRVSLTRDTFEEILFMDLRGLRSDDTAIYFCARRHSDYCDLDVWGGGTQLLVSSASTKG

SEQ ID NO: 397 - protein, 124 aa, Homo sapiens
QVQLVQSGAALKKPGASLRISCLTYGYKFTDHLIYWWRQAPGQGLEWIGWIKPETGQPSYSYRFQGRVSLTRDTFEEIVFMDLRGLRSDDTAIYFCARRHSDYCDFDVWGSGSQVIVSSASTKG

SEQ ID NO: 398 - protein, 124 aa, Homo sapiens
QVQLVQSGAALKKPGASLRISCQTYGYKFTDHLIYWWRQAPGQGLEWIGWIKPETGQPSYSYRFQGRVSLTRDTFEEIVFMDLRGLRSDDTAIYFCARRHSDYCDFDVWGGGSQVIVSSASTKG

SEQ ID NO: 399 - protein, 124 aa, Homo sapiens
QVQLVQSGAALKKPGASLRISCQTYGYKFTDHLIYWWRQAPGQGLEWIGWIKPETGQPSYSYRFQGRVSLTRDTFEEIVFMDLRGLRSDDTAIYFCARRHSDYCDFDVWGSGSQVIVSSASTKG

SEQ ID NO: 400 - protein, 124 aa, Homo sapiens
QVQLVQSGAALKKPGASVRISCQTYGYKFTDHLIHWWRQAPGQGLEWIGWIKPDTGQPSYSSRFQGRVSLTRDTFEEIVFMDLRGLRSDDTAIYFCARRHSDYCDFDVWGSGSQVLVSSASTKG

SEQ ID NO: 401 - protein, 124 aa, Homo sapiens
QVQLVQSGAALKKPGASLRISCQTYGYKFTDHLIYWWRQAPGQGLEWIGWIKPETGQPSYSYRFQGRVSLTRDTFEEIVFMDLRGLRSDDTAIYFCARRHSDYCDFDVWGSGSQVLVSSASTKG

SEQ ID NO: 402 - protein, 130 aa, Homo sapiens
QVQLVQSGSDVRKPGATVTVSCKADEDEDDFTAYNYFMHWVRQAPGHGLEWIGWINPRTGQPNHAKQFQGRVTLTRERSTSTVFMKLTNLRLDDTAVYFCARPLRGGDTWHYHSWGRGTSLTVSSASTKG

SEQ ID NO: 403 - protein, 130 aa, Homo sapiens; identical to SEQ ID NO: 380

SEQ ID NO: 404 - protein, 128 aa, Homo sapiens
QVQLLQSGAAVTKPGASVRVSCEASGYNIRDYFIHWWRQAPGQGLQWVGWINPKTGQPNNPRQFQGRVSLTRHASWDFDTFSFYMDLKGLRSDDTAIYFCARQRSDYWDFDVWGSGTQVTVSSASTKG

SEQ ID NO: 405 - protein, 130 aa, Homo sapiens
EVQLVQSGSDVRKPGATVTVSCKADEDEDDFTAYDYFMHWVRQAPGHGLEWIGWINPRTGQPNHAKQFQGRVTLTRERSTSTVFMKLTNLRLDDTAVYFCARPLRGGDTWHYHSWGRGTSLTVSSASTKG

SEQ ID NO: 406 - protein, 130 aa, Homo sapiens; identical to SEQ ID NO: 380

SEQ ID NO: 407 - protein, 130 aa, Homo sapiens; identical to SEQ ID NO: 380

SEQ ID NO: 408 - protein, 124 aa, Homo sapiens; identical to SEQ ID NO: 384

SEQ ID NO: 409 - protein, 128 aa, Homo sapiens
QVQLLQSGAAVTKPGASVRVSCEASGYKISDHFIHWWRQAPGQGLQWVGWINPKTGQPNNPRQFQGRISLTRQASWDFDTFSFYMDLKALRSDDTAVYFCARQRSDYWDFDVWGSGTQVTVSSASTKG

SEQ ID NO: 410 - protein, 130 aa, Homo sapiens; identical to SEQ ID NO: 402

SEQ ID NO: 411 - protein, 130 aa, Homo sapiens; identical to SEQ ID NO: 382

SEQ ID NO: 412 - protein, 124 aa, Homo sapiens
QVQLVQSGAALKKPGASVRISCQTYGYKFTDHLIYWWRQAPGQGLEWIGWIKPETGQPSYSYRFQGRVSLTRDTFEEIVFMDLRGLRSDDTAIYFCARRHSDYCDFDVWGSGSQVLVSSASTKG

SEQ ID NO: 413 - protein, 130 aa, Homo sapiens; identical to SEQ ID NO: 382

SEQ ID NO: 414 - protein, 125 aa, Homo sapiens
QVQLVQSGAALKKPGASVRISCQAYGYKFTDYLIHWWRQAPGQGLEWIGWIKPETGQPSYSYKFQGRVTLTRDTFEEILFMDLRGLRSDDTAIYFCARRHSDYCDFDVWGSGSQVIVSSASTKGA

SEQ ID NO: 415 - protein, 130 aa, Homo sapiens
EVQLVESGSDVRKPGATVTVSCKADEDEDDFTAYNYFMHWVRQAPGHGLEWIGWINPRTGQPNHAKQFQGRVTLTRERSTSTVFMKLTNLRLDDTAVYFCARPLRGGDTWHYHSWGRGTSLTVSSASTKG

SEQ ID NO: 416 - protein, 130 aa, Homo sapiens; identical to SEQ ID NO: 382

SEQ ID NO: 417 - protein, 124 aa, Homo sapiens
QVQLVQSGAALKKPGASVRISCQAYGYKFTDHLIYWWRQAPGQGLEWIGWIKPETGQPSYAYKFQGRVTLTRDTFEEIHFMDLRGVRNDDTATYFCARRHSDYCDFDVWGSGSQVIVSSASTKG

SEQ ID NO: 418 - protein, 130 aa, Homo sapiens; identical to SEQ ID NO: 415

SEQ ID NO: 419 - protein, 124 aa, Homo sapiens
QVQLVQSGTAVKRPGASVRVSCQASGYTFTDYFIYWWRQAPGQGLEWLGWINPLTSQPSYPSRFQGRLTLTRDTFDEMLYMDLRGLRSDDTGIYFCARRHSDYCDFDIWGSGTQIIVSSASTKG

SEQ ID NO: 420 - protein, 130 aa, Homo sapiens; identical to SEQ ID NO: 380

SEQ ID NO: 421 - protein, 128 aa, Homo sapiens
QVHLSQSGAAVTKPGASVRVSCEASGYKISDHFIHWWRQAPGQGLQWVGWINPKTGQPNNPRQFQGRVSLTRQASWDFDTYSFYMDLKAVRSDDTAIYFCARQRSDFWDFDVWGSGTQVTVSSASTKG

SEQ ID NO: 422 - protein, 128 aa, Homo sapiens; identical to SEQ ID NO: 361

SEQ ID NO: 423 - protein, 128 aa, Homo sapiens
QVHLSQSGAAVTKPGASVRVSCEASGYKISDHFIHWWRQAPGQGLQWVGWINPKTGQPNNPRQFQGRVSLTRQASWDFDTYSFYMDLKALRSDDTAIYFCARQRSDFWDFDVWGSGTQVTVSSASTKG

SEQ ID NO: 424 - protein, 128 aa, Homo sapiens
QVQLLPFGGAVTKPGASVRVSCEASGYNIRDYFIHWWRQAPGQGLQWVGWINPKTGQPNNPCQFQGRVSLTRPASWDFDTISFYMDLKALRLDDTAVYFCARQRSDYWDFDVWGSGTQVTVSSASTKG

SEQ ID NO: 425 - protein, 124 aa, Homo sapiens
QVQLVQSGAALKKPGASLRISCQTYGYKFTDHLIYWWRQAPGQGLEWIGWIKPETGQPSYSYRFQGRVSLTRDTFEEIAFMDLRGLRSDDTAIYFCARRHTDYCVFDVWGSGSQIIVSSASTKG

SEQ ID NO: 426 - protein, 130 aa, Homo sapiens
QVQLVESGSDVRKPGATVTVSCKADEDEDDFTAYNYFMHWVRQAPGHGLEWIGWINPRTGQPNHAKQFQGRVTLTRERSTSTVFMKLTNLRLDDTAVYFCARPLRGGDTWHYHSWGRGTSLTVSSASTKG

SEQ ID NO: 427 - protein, 124 aa, Homo sapiens
QVQLVQSGAALKKPGASLRISCQTYGYKFTDHLIYWWRQAPGQGLEWMGWIKPETGQPSYSYRFQGRVSLTRDTFEEIVFMDLRGLRSDDTAIYFCARRHSDYCDFDVWGSGSQVIVSSASTKG

SEQ ID NO: 428 - protein, 128 aa, Homo sapiens
QVQLLQSGAAVTKPGASVRVSCEASGYNIRDYFIHWWRQAPGQGLQWVGWINPKTGQPNNPRQFQGRVSLTRHASWDFDTFSFYMDLKALRSDDTAVYFCARQRSDYWDFDVWGSGTQVTVYSASTKG

SEQ ID NO: 429 - protein, 128 aa, Homo sapiens
QVQLLQSGAAVTKPGASVRVSCEASGYNIRDYFIHWWRQAPGQGLQWVGWINPKTGQPNNPRQFQGRVSLTRQASWDFDTISFYMDLKALRLDDTAVYFCARQRSDYWDFDVWGSGTQVTVSSASTKG

SEQ ID NO: 430 - protein, 125 aa, Homo sapiens
RQVQLVQSGAALKKPGASLRISCQAYGYKFTDHLIYWWRQAPGQGLEWIGWIKPETGQPSYSYKFQGRVSLTRDTFQEILFMDLRGLRSDDTAIYFCARRHSDYCDFDVWGSGSQILVSSASTKG

SEQ ID NO: 431 - protein, 124 aa, Homo sapiens
QVQLVQSGAALKKPGASLRISCQAYGYKFTDHLIYWWRQAPGQGLEWIGWIKPETGQPSYSYKFQGRVSLTRDTFQEILFMDLRGLRSDDTAIYFCARRHSDYCDFDVWGSGSQVIVSSASTKG

SEQ ID NO: 432 - protein, 130 aa, Homo sapiens; identical to SEQ ID NO: 402

SEQ ID NO: 433 - protein, 128 aa, Homo sapiens; identical to SEQ ID NO: 387

SEQ ID NO: 434 - protein, 124 aa, Homo sapiens
QVQLVQSGTAVKRPGASVRVSCQASGYTFIDHFIYWWRQAPGQGLEWLGWINPLTSQPSYPSRFQGRLTLTRDTFDEMLYMDLRGLRSDDTGIYFCARRHSDYCDFDIWGSGTQIIVSSASTKG

SEQ ID NO: 435 - protein, 128 aa, Homo sapiens
QVQLLQSGAVVTKPGASVRVSCEASGYKIRDYFIHWWRQAPGQGLQWVGWINPQTGQPNIPRPFQGRVTLTRHASWDFDTFSFYMDLKALRSDDTAIYFCARRRSDYCDFDVWGSGTHVTVSSASTKG

SEQ ID NO: 436 - protein, 130 aa, Homo sapiens; identical to SEQ ID NO: 380

SEQ ID NO: 437 - protein, 130 aa, Homo sapiens; identical to SEQ ID NO: 402

SEQ ID NO: 438 - protein, 128 aa, Homo sapiens
QVQLLQSGAAVTKPGASVRVSCEASGYNIRDYFIHWWRQAPGQGLQWVGWINPKTGQPNNPRLFQGRVSLTRHASWDFDTFSFYMDLKAVRSDDTAVYFCARQRSDYWDFDVWGSGTQVTVSSASTKG

SEQ ID NO: 439 - protein, 123 aa, Homo sapiens
EIVLTQSPATLSLSPGERATLSCRASQGLNFVVWYQQKRGQAPRLLIHAPSGRAPGVPDRFSARGSGTEFSLVISSVEPDDFAIYYCQEYSSTPYNFGPGTRVDRKRTVAAPSVFIFPPSDEQ

SEQ ID NO: 440 - protein, 123 aa, Homo sapiens
EIVLTQSPATLSLSPGERATLSCRASQGLNFVVWYQQKGGQAPRLLIHGPTDRAPGVPDRFSARGSGTEFSLVISSVEPDDFALYYCQEYSSTPYNFGPGTRVDRKRTVAAPSVFIFPPSDEQ

SEQ ID NO: 441 - protein, 123 aa, Homo sapiens
EIVLTQSPATLSLSPGERATLSCRASQGLNFVVWYQQKRGQAPRLLIHGPSHRAPGVPDRFSARGSGTEFSLVISSVEPDDFAIYYCQEYSSTPYNFGPGTRVDRKRTVAAPSVFIFPPSDEQ

SEQ ID NO: 442 - protein, 123 aa, Homo sapiens
EIVLTQSPATLSLSPGERATLSCRASQGVNFVVWYQQKRGQAPRLLIYGPSNRAPGVPDRFSARGSGTEFSLVISSVEPDDFALYYCQEYSSTPYNFGPGTRVDRKRTVAAPSVFIFPPSDEQ

SEQ ID NO: 443 - protein, 123 aa, Homo sapiens
EIVLTQSPTTLSLSPGERATLSCRASQGVNLVVWYQQKRGQAPRLLIYGPSDRAPGVPDRFSARGSGTEFSLVISSVEPDDFALYYCQEYSSTPYNFGTGTRVDRKRTVAAPSVFIFPPSDEQ

SEQ ID NO: 444 - protein, 123 aa, Homo sapiens
EIVLTQSPATLSLSPGERATLSCRASQGLNFVVWYQQKRGQAPRLLIHAPSDRAPGVPDRFSARGSGTDFSLVISSVEPDDFAIYYCQEYSSTPYNFGPGTRVDRKRTVAAPSVFIFPPSDEQ

SEQ ID NO: 445 - protein, 112 aa, Homo sapiens
EIVLTQSPATLSLSPGERATLSCRASQGVNFVVWYQQKRGQAPRLLIYGPSDRAPGVPDRFSARGSGTEFSLVISSVEPDDFALYYCQEYSSTPYNFGTGTRVDRKRTVAAP

SEQ ID NO: 446 - protein, 111 aa, Homo sapiens
EIVLTQSPATLSLSPGERATLSCRASQGVNFVVWYQQKRGQAPRLLIYGNSDRVPGVPDRFSARGSGTEFSLVISSVEPDDFALYYCQEYSSTPYNFGPGTRVDRKRTVAA

SEQ ID NO: 447 - protein, 126 aa, Homo sapiens
SEIVLTQSPATLSLSPGERATLSCRASQSINNYLAWYQQKPGQAPRLLIYDASNRATGIPARFSGGGSGTDFTLTISSLEPEDFAVYYCQQRANWRLLTFGGGTKVEIKRTVAAPSVFIFPPSDEQ

SEQ ID NO: 448 - protein, 125 aa, Homo sapiens
EIVMTQSPDTLSVSPGERATLSCRASQSVNSNLAWYQQKPGQAPRLLIYGASTRATAVPARFSGSGSGTEFTLTISSLQSEDSAVYYCQQYYQWLSYTFGQGTKLEIKRTVAAPSVFIFPPSDEQ

SEQ ID NO: 449 - protein, 125 aa, Homo sapiens
DIQMTQSPSTLAASIGGTVRVSCRASQSITGNWVAWYQQRPGKAPRLLIYRGAALLGGVPSRFSGSAAGTDFTLTIGNLQAEDFGTFYCQQYDTYPGTFGQGTKVEVKRTVAAPSVFIFPPSDEQ

SEQ ID NO: 450 - protein, 126 aa, Homo sapiens
SEIVMTQSPATLSMSPGERATLSCRASLSVNTNLAWYQQKPGQAPRLLIYGASTRATGIPARFSGSGSGTEFTLTISSLQSEDFALYYCQQYNHWPQTFGQGTKVEIKRTVAAPSVFIFPPSDEQK

SEQ ID NO: 451 - protein, 124 aa, Homo sapiens
DIQMTQSPPSLSASVGDRVTITCQASQDINNFLNWYQQKPGKAPRLLIYDASNLESGVSSRFSGSRSGTDFTLTISSLLPEDIATYSCQQYSNLPYTFSQGTKLEIKRTVAAPSVFIFPPSDEQ

SEQ ID NO: 452 - protein, 123 aa, Homo sapiens
DIQMTQSPSSLSASVGDRVTITCQAGQGIGSSLQWYQQKPGKAPKLLVHGASNLHRGVPSRFSGSGFHTTFSLTISGLQRDDFATYFCAVLEFFGPGTKVEIKRTVAAPSVFIFPPSDEQLKS

SEQ ID NO: 453 - protein, 121 aa, Homo sapiens
DIQMTQSPSSLSASVGDRVTITCQAGQGIGSSLQWYQQKPGKAPKLLVHGASNLHRGVPSRFSGSGFHTTFSLTISGLQRDDFATYFCAVVEFFGPGTKVDIKRTVAAPSVFIFPPSDEQL

SEQ ID NO: 454 - protein, 122 aa, Homo sapiens
DIQMTQSPSSLSASVGDRVTITCQASQGIGSSLQWYQQKPGRAPNLLVHGASKLHRGVPSRFSGSGFHTTFSLTISGLQRDDFATYFCAVLEFFGPGTKVEIKRTVAAPSVFIFPPSDEQLK

SEQ ID NO: 455 - protein, 105 aa, Homo sapiens
DIQMTQSPSSLSASVGDRVSINCQAGQGLGSSLNWYQQKPGRAPKLLVHGASNLQRGVPSRFSGSGFHTTFTLTISSLQPDDVATYFCAAFQWFGPGTKVEIKRT

SEQ ID NO: 456 - protein, 102 aa, Homo sapiens
DIQMTQSPSSLSASVGDRVSIHCQAGQGIGSSLNWYQQKPGRAPRLLVHGASNLQRGVPSRFSGSGFHTTFTLTISSLQPDDVATYWCAALEFFGPGTKVEI

SEQ ID NO: 457 - protein, 122 aa, Homo sapiens
DIQMTQSPSSLSASVGDRVTINCQAGQGIGSSLNWYQKKPGRAPKLLVHGASNLQRGVPSRFSGSGFHTTFTLTISSLQPDDVATYFCAVFQWFGPGTKVDIKRTVAAPSVFIFPPSDEQLK

SEQ ID NO: 458 - protein, 120 aa, Homo sapiens
DIQMTQSPSSLSASVGDRVTITCQAGQGIGSSLNWYQQKPGRAPKLLVYGASNLQRGVPSRFSGSGFHTTFTLTISSLQPEDFATYFCSVYEFLGPGTKVEIKRTVAAPSVFIFPPSDEQ

SEQ ID NO: 459 - protein, 120 aa, Homo sapiens
DIQMTQSPSSLSVSVGDRVSITCRATQGIGNSLNWYQQKPGKAPKVLIYGTTKLHGGVPSRFSGGGSGSTGTLTIDSLQPEDIATYFCQLFEFFGPGTKVEIKRTVAAPSVFIFPPSDEQ

SEQ ID NO: 460 - protein, 120 aa, Homo sapiens
DIQMTQSPSSLSASVGDRVTITCQASQGIGSSLQWYQQKPGRAPNLLVHGASNLHRGVPSRFSGSGFHTTFSLTISGLQRDDFATYFCAVLEFFGPGTKVDIKRTVAAPSVFIFPPSDEQ

SEQ ID NO: 461 - protein, 120 aa, Homo sapiens
DIQMTQSPSSLPASVGDTVTITCQAGQGIGSSLQWYQQRPGRAPNLLVYDASNLQRGVPSRFTGTGFHTTFTLTIRGLRPEDFGTYFCASLEFFGPGTKVDIKRTVAAPSVFIFPPSDEQ

SEQ ID NO: 462 - protein, 120 aa, Homo sapiens
YIQMTQSPSSLSASIGDRVTITCQAGQGIGSSLNWYQQKPGKAPKLLVHGASNLQRGVSSRFSGSGFHTTFTLTISSLRPEDVGTYFCEVYEFIGPGTKVDIKRTVAAPSVFIFPPSDEQ

SEQ ID NO: 463 - protein, 120 aa, Homo sapiens
DIQMTQSPSSLSASVGDRVSINCQAGQGIGSSLNWYQQKRGKAPKLLVHGASTLQRGVPSRFSGSGFHTTFTLTISSLQPDDVATYFCESFQWFGPGTKVEIKRTVAAPSVFIFPPSDEQ

SEQ ID NO: 464 - protein, 120 aa, Homo sapiens
DIQMTQSPSSLSASVGDRVTITCQASQGIGSSLQWYQQKPGRAPKLLVHGASNLHRGVPSRFSGSGFHTSFTLTISSLQPDDVATYFCAVLEFFGPGTKVEIKRTVAAPSVFIFPPSDEQ

SEQ ID NO: 465 - protein, 120 aa, Homo sapiens
DIQMTQSPSSLSASVGDRVSIHCQAGQGIGSSLKWYQQKSGRAPRLLVHGASNLQRGVPSRFSGSGFHTTFTLTISSLQPDDVATYWCAVLEFFGPGTKVEIKRTVAAPSVFIFPPSDEQ

SEQ ID NO: 466 - protein, 129 aa, Homo sapiens
QSVLTQPPSASGAPGQRVTISCSGGPSNVGGNYVYWYRQFPGTAPNLLILRDDQRPSGVPDRFSASKSGNSASLAISGLRPDDEAFYFCATYDSDGSVRLFGGGTTLTVLSQPKAAPSVTLFPPSNGGR

SEQ ID NO: 467 - protein, 129 aa, Homo sapiens
QSALTQTPSVSGAPGQRVTISCSGGPSNVGGNYVYWYQQFPGAAPKLLIRRDDQRPSGVPDRFSGSKSGNSASLAISGLRLDDEAYYFCATYDSGWSIRLFGGGTRLTVLSQPKAAPSVTLFPPSSEEL

SEQ ID NO: 468 - protein, 125 aa, Homo sapiens
SQAVVTQPPSVSGAPGQRVTISCSGGPSNVGGNLVYWYKQFPGTAPKLLIRRDDQRPSGVPDRFSGSKSGNSASLAISGLRPDDEAFYFCATYDSHGSIRLFGGGTLLTVLSQPKAAPSVTLFPP

SEQ ID NO: 469 - protein, 129 aa, Homo sapiens
QTVVTQPPSASGTPGQRVTISCSGGGSNIGGNLVSWYQHFPGAAPKLLIYRNDQRPSGVPDRFSGSKSGTSASLTISGLRSDDEATYFCAAYDCTLSLRLFGGGTTLNVLSQPKAAPSVTLFPPSSEEL

SEQ ID NO: 470 - protein, 129 aa, Homo sapiens
QSALTQPPSVSGTPGQNVTISCSGGGSNVGGNLVSWYQHFPGAAPKLLIHRDNQRPSGVPDRFSVLKSGNSASLAISGPRSDDEAFYFCAVYDSSLSLGLFGGGTKLTVLSQPKAAPSVTLFPPSSEEL

SEQ ID NO: 471 - protein, 130 aa, Homo sapiens
QSALTQPPSASGAPGQRVTISCSGGPSNVGGNYVYWYRQFPGTAPTLLILRDDQRPSGVPDRFSASKSGNSASLAISGLRPDDEGFYFCATYDSDGSIRLFGGGTALTVLSQPKAAPSVTLFPPSSEELK

SEQ ID NO: 472 - protein, 119 aa, Homo sapiens
NFMLTQAPSASGAPGQRVTISCSGGPSNVGGNYVYWYRQYPGTAPKLLILRDDQRPSGVPDRFSASKSGNSASLAISELRPDDEAFYFCATYDSDGSIRLFGGGTALTVLSQPKAAPSV

SEQ ID NO: 473 - protein, 124 aa, Homo sapiens
NFMLTQPPSASGAPGQRVTISCSGGPSNVGGNYVYWYRQFPGTAPNLLILRDDQRPSGVPDRFSASKSGNSASLAISGLRPDDEAFYFCATYDSDGSIRLFGGGTTLTVLSQPKAAPSVTLFPP

SEQ ID NO: 474 - protein, 118 aa, Homo sapiens
QSVLTQPPSASGAPGQRVTISCSGGPSNVGGNYVYWYRQFPGTAPKLLILRDDQRPSGVPDRFSASKSGNSASLAISGLRPDDEAFYFCATYDSDGSIRLFGGGTALTVLSQPKAAPS

SEQ ID NO: 475 - protein, 120 aa, Homo sapiens
QLVLTQPPSVSGTPGQNVTISCSGGGSHVGGNLVSWYQHFPGAAPKLLIHRDNQRPSGVPDRFSALKSGNSASLAISGLRSDDEAFYFCAVYDSSLSLGLFGGGTKLTVLSQPKAAPSVT

SEQ ID NO: 476 - protein, 131 aa, Homo sapiens
RTVVTQPPSVSGAPGQRVTISCTGSSSNIGAGYDVHWYQQLPGTAPKLLIYGNSNRPSGVPDRFSGSKSGTSASLAITGLQAEDEADYYCQSYDSSLSGSGVFGTGTKVTVLGQPKANPTVTLFPPSSEEL

SEQ ID NO: 477 - protein, 128 aa, Homo sapiens
QSALTQPPSASGAPGQRVTISCSGGPSNVGGNYVYWYRQFPGTAPKLLILRDDQRPSGVPDRFSASKSGNSASLAISGLRPDDEALYFCATYDSDGSIRLFGGGTALTVLSQPKAAPSVTLFPPGWEE

SEQ ID NO: 478 - protein, 124 aa, Homo sapiens
QPVLTQPPSASGAPGQRVTISCSGGPSNVGGNYVYWYRQFPGTAPNLLILRDDQRPSGVPDRFSASKSGNSASLAITGLRPDDEAFYFCATYDSDGSIRLFGGGTALTVLSQPKAAPSVTLFPP

SEQ ID NO: 479 - protein, 122 aa, Homo sapiens
QSALTQPPSASGAPGQRVTISCSGGPSNVGGNYVYWYRQFPGTAPNLLILRDDQRPSGVPDRFSASKSGNSASLAISGLRPDDEAFYFCATYDSDGSIRLFGGGTTLTVLSQPKAAPSVTLF

SEQ ID NO: 480 - protein, 129 aa, Homo sapiens; identical to SEQ ID NO: 467

SEQ ID NO: 481 - protein, 129 aa, Homo sapiens
QLVLTQPPSVSATPGQTVTISCSGSGSNVGGNHVYWYRQLPGAAPTLVISKTDHRPSRVPDRFSGSKSGNSASLAISGLRPDDEAAYFCATYDTGLSLRLFGGGTRLAVLSQPKAAPSVTLFPPSSEEL

SEQ ID NO: 482 - protein, 129 aa, Homo sapiens
QSALTQPPATSGTPGQRVTISCSGGGSNVGGNLVSWYQQFPGAAPKLILHRDGQRPSGVPDRFSASKSGTSASLTISGLRSDDEATYFCAAFDSALSLPLFGGGTKLTVLSQPKAAPSVTLFPPSSEEL

SEQ ID NO: 483 - protein, 129 aa, Homo sapiens
QSVLTQVLSVSGTPGQRVIISCSGTSSNVGGNLVSWYQHLPGAAPRLLIHRDDQRPSGVPDRFSGSKSGNSASLVISGLRSDDEADYFCGAYDSTFSLPVFGGGTRLTVLSQPKAAPSVTLFPPSSEEL

SEQ ID NO: 484 - protein, 128 aa, Homo sapiens
NFMLTQPPSVSATPGQTVTISCSGSGSNVGGNHVYWYRQLPGAAPTLVISKTDHRPSRVPDRFSGSKSGNSASLAISGLRPDDEAVYFCATYDTGLSLRLFGGGTRLTVLSQPKAAPSVTQFPPSSEE

SEQ ID NO: 485 - protein, 129 aa, Homo sapiens
QSALTQPPSVSATPGQTVTISCSGSGSNVGGNHVYWYRQLPGAAPTLLISKTNHRPSQVPDRFSASKSGNSASLAISGLRPDDEADYFCGTYDTSLSLRLFGGGTRLTVLSQPKAAPSVTLFPPSSEEL

SEQ ID NO: 486 - protein, 129 aa, Homo sapiens
QSALTQPPSASGTPGQRVTISCSGGGSNIGGNLVSWYQHFPGTAPKLLIYRNDQRPSGVPDRFSGSKSGTSASLTISGLRSDDEATYFCAAYDSSLSLRLFGGGTTLNVLSQPKAAPSVTLFPPSSEEL

SEQ ID NO: 487 - protein, 129 aa, Homo sapiens
QSALTQPPSVSGTPGQNVTISCSGGGSDVGGNLVSWYQHFPGAAPKLLIHRDNQRPSGVPDRFSALKSGNSASLAISGLRSDDEAFYFCAVYDSSLSLGLFGGGTKLTVLSQPKAAPSVTLFPPSSEEL

SEQ ID NO: 488 - protein, 129 aa, Homo sapiens
QAVVTQPPSVSATPGQTVTISCSGSGSNVGGNHVYWYRQLPGAAPTLLISKTNRRPSQVPDRFSGSKSGNSASLAISGLRPDDEADYFCATYDTDLSLRLFGGGTRLTVLSQPKAAPSVTLFPPSSEEL

SEQ ID NO: 489 - protein, 120 aa, Homo sapiens
QSALTQPPAASGAPGQRVTISCSGGGSNVGGNLVSWYQQFPGAAPKLILHRDGQRPSGVPDRFSASKSGTSASLTISGLRSDDEATYFCAAYDSAVSLPVFGGGTKLTVLSQPKAAPLVT

SEQ ID NO: 490 - protein, 128 aa, Homo sapiens
NFMLTQPPSASGTPGQRVTISCSGGGSNIGGNLVSWYQHFPGAAPKLLIYRNDQRPSGVPDRFSGSKSGTSASLAISGLRSDDKATYFCAAYDSTLSLRLFGGGTTLTVLSQPKAAPSVTLFPPSSEE

SEQ ID NO: 491 - protein, 127 aa, Homo sapiens
QSVLTQVLSVSGTPGQRVIISCSGTSSNVGGNLVSWYQHLPGAAPRLLIHRDDQRPSGVPDRFSGSKSGNSASLVISGLRSDDEADYFCAAYDSTFSLPVFGGGTRLTVLSQPKAAPSVTLFPPSSE

SEQ ID NO: 492 - protein, 129 aa, Homo sapiens
QSALTQPPSVSATPGQTVTISCSGSGSNVGGNHVYWYRQLPGAAPTLLISKTDHRPSRVPDRFSASKSGNSASLAISGLRPDDEAIYFCATYDTGLSLRLFGGGTRLTVLSQPKAAPSVTLFPPSSEEL

SEQ ID NO: 493 - protein, 129 aa, Homo sapiens
QSALTRTPSVSGAPGQRVTISCSGGPSNVGGNYVYWYQQFPGAAPKLLIRRDDQRPSGVPDRFSGSKSGNSASLAISGLRLDDEAYYFCATYDSGWSIRLFGGGTRLTVLSQPKAAPSVTLFPPSSEEL

SEQ ID NO: 494 - protein, 115 aa, Homo sapiens
QSALTQAPSASGTPGQRVTISCSGGGSNIGGNLVSWYQHFPGAAPKLLIYRNDQRPSGVPDRFSASKSGTSASLAISGLRSDDEATYFCAAYDSTLSLRLFGGGTTLAVLSQPKA

SEQ ID NO: 495 - protein, 129 aa, Homo sapiens
NFMLTQPPSVSGAPGQRVTISCSGGPSNVGGNLVYWYKQFPGTAPKLLIRRDDQRPSGVPDRFSGSKSGNSASLAISGLRPDDEAFYFCATYDSHGSIRLFGGGTLLTVLSQPKAAPSVTLFPPSSEEL

SEQ ID NO: 496 - protein, 129 aa, Homo sapiens
QLVLTQPPSVSGAPGQRVTISCSGGPSNVGGNLVYWYKQFPGTAPKLLIRRDDQRPSGVPDRFSGSKSGNSASLTISGLRPDDEAFYFCATYDSQGSTRLFGGGTVLTVLSQPKAAPSVTLFPPSSEEL

SEQ ID NO: 497 - protein, 128 aa, Homo sapiens
QSALTQPPSVSGAPGQRVTISCSGGPSNVGGNYVYWYRQFPGTAPKLLILRDDQRPSGVPDRFSASKSGNSASLAISGLRPDDEAFYFCATYDSQGSFRVFGGGTALTVLSQPKAAPSVTLYPPSSEE

SEQ ID NO: 498 - protein, 129 aa, Homo sapiens
NFMLTQPPSASGAPGQRVTISCSGGPSNVGGNYVYWYRQFPGTAPNLLILRDDQRPSGVPDRFSASKSGNSASLAISGLRPDDEAFYFCATYDSDGSIRLFGGGTTLTVLSQPKAAPSVTLFPPSSEEL

SEQ ID NO: 499 - protein, 123 aa, Homo sapiens
QVLSVSGTPGQRVIISCSGTSSNVGGNLVSWYQHLPGAAPRLLIHRDDQRPSGVPDRFSGSKSGNSASLVISGLRSDDEADYFCAAYDSTFSLPVFGGGTRLTVLSQPKAAPSVTLYAPSSEE

SEQ ID NO: 500 - protein, 117 aa, Homo sapiens
PVTLSASVGDRVTITCRASEDISKYLNWYQHKPGKAPKLLIYTASSLETGVPSRFSGSGSGTDFSLTISSLQPDDFATYYCQQSYTSSVTFGQGTRVEVKRTVAAPSVFIFPPSDEQ

SEQ ID NO: 501 - protein, 124 aa, Homo sapiens
PATLAVSPGERATISCKSSQNLLYSANNQHSLAWYQQRPGQPPKLLLYWASTRLSGVPDRFSGSGSGTDFTLTISNLQAEDVAVYYCQQYYSPPPTFGQGTKVEIRRTVAAPSVFIFPPSDEQL

SEQ ID NO: 502 - protein, 115 aa, Homo sapiens
TLSASVGDRVTITCRASQSINNYLNWYQQKPGKAPKLLIYAASSLQSGVPSRFSGSGSGTDFTLTISSLQPEDFVTYYCQQTYSNPRMFGQGTKVEIKRTVAAPSVFIFPPSDEQ

SEQ ID NO: 503 - protein, 118 aa, Homo sapiens; identical to SEQ ID NO: 235

SEQ ID NO: 504 - protein, 126 aa, Homo sapiens
RGPVTLAVSLGERATITCKSSQSVLVHSNNKNYLSWYQQKPGQPPKLLIYWASTRESGVPERFSGSGSGTDFTLSISSLQAEDVAVYYCHQYFSTPRTFGQGTKVEIKGTVAAPSVFIFPPSDEQL

SEQ ID NO: 505 - protein, 123 aa, Homo sapiens
SEIVLTQSPATLSLSPGESATLSCRASQSLSSSLAWYQQKPGQAPRLLIYDTSDRATGIPARFSGRGSGTDFTLTISSLEPEDFAVYYCQQRSNWAITFGQGTRLEIKRTVAAPSVFIFPPSD

SEQ ID NO: 506 - protein, 123 aa, Homo sapiens
  misc_feature (18)..(18): Xaa can be any naturally occurring amino acid
  misc_feature (35)..(35): Xaa can be any naturally occurring amino acid
EIVLTQSPGTLSLSPGEXATLSCRASQTISNNYLXWYQQKAGQAPRLLIYGASSGATGIPDRFSGSGSGTDFTLTISRLEPEDFAVYYCQQYGLSPWTFGRGTKVEIKRTVAAPSVFIFPPSD

SEQ ID NO: 507 - protein, 129 aa, Homo sapiens
QSALTQPRSVSGSPGQSVTISCTGTSSDVGAYNYVSWYRQHPGKAPKLMINDVSKRPSGVPDRFSGSKSGNTASLTISGLQAEDEADYYCCSYAGTYSYVFGTGTKVTVLGQPKANPTVTLFPPSSEEL

SEQ ID NO: 508 - protein, 116 aa, Homo sapiens
APVTLSASVGDTVTITCRASQPIATFLNWYQHKPGQAPKLLIYAASTFQRGAPSRYSGSGSGTDFTLTINSLQPEDLATYYCQQTFTDPVTFGQGTRLEIKRTVAAPSVFIFPPSD

SEQ ID NO: 509 - protein, 122 aa, Homo sapiens
DIQMTQSPASLSASVGDRVTITCRASQGISHYLAWYQQKPGKVPRLLIYAASRLQSGVTSRFSGSGSGTEFTLTISSLLPEDAAVYFCQKYDTDPMTFGQGTRLEIKRTVAAPSVFIFPPSD

SEQ ID NO: 510 - protein, 123 aa, Homo sapiens
DIQMTQSPSSLSASIGDRVTITCRANQHIRSFLNWYQQTPGKAPKLLIYAASTLQRGVPSRFSGSGSGTDFTLTITSLEREDLATYYCQQTYTSPITFGQGTRLEIKRTVAAPSVFIFPPSDE

SEQ ID NO: 511 - protein, 124 aa, Homo sapiens
EIVLTQSPGTLSLSPGERATLSCRASQSVSNNYLAWYQQKPGQAPRLLIYGASSRATGIPDRFSGSGSGTDFTLTISRLEPEDFAVYYCQQYATSSLYTFGQGTKLEIKRTVAAPSVFIFPPSD

SEQ ID NO: 512 - protein, 118 aa, Homo sapiens
LSVSLGERATINCKSSQSILYSSDKKNYLAWYQQKIGQPPKLLLYWASTRESGIPDRFSGSGSGSDFTLTISSLQPEDVAVYYCQQYYISPFTFGPGTKVDLKRTVAAPSVFIFPPSD

SEQ ID NO: 513 - protein, 120 aa, Homo sapiens
NFMLTQPASVSGSPGQSITLSCTGTTSDVRDSNFVSWYQQVPGKAPKLIIYDVSARPSGVSFRFSGSKSGNTASLTISGLQAEDEALYYCSSFTPTNTLVFGGGTKLTVLGQPKAAPSVT

SEQ ID NO: 514 - protein, 114 aa, Homo sapiens
SQSVVTQEPSLTVSPGGTVTLTCGPSTGAVTSGFYPHWFQQKPGQAPRALIYSTSNKYSWTPARFSGSLLGGKAVLTLSDVQPDDEAEYYCLLLLYYGGPWIFGGGTKLTVLVS

SEQ ID NO: 515 - protein, 130 aa, Homo sapiens
QAVVTQEPSLTVSPGGTVTLTCASSTGAVTSGFYPHWFQQKPGQAPRALIYSTSNRYSWTPARFSGSLLGGKAALTLSGVQPEDEAEYYCLLLPYYGGPWIFGGGTKLTVLGQPKAAPSVTLFPPSSEEL

SEQ ID NO: 516 - protein, 122 aa, Homo sapiens
EIVMTQSPATLSVSPGDRATLSCRASQSVSTNLAWYQQKPGQAPRLLIYGASTRATGIPATFSGSGFATEFTLTISSLQSEDFAVYYCQQYNNWPPAFGQGTKVEIKRTVAAPSVFIFPPSD

SEQ ID NO: 517 - protein, 130 aa, Homo sapiens
QSVLTQPPSASGSPGQSITISCTGTSSDVGGYNYVSWYQQPPGKAPKVIIYEVSKRPSGVPDRFSGSKSGNTASLTVSGLQAEDEADYYCSSYAGSNNFVFGTGTEVTVVGQPKANPTVTLFPPSSEELL

SEQ ID NO: 518 - protein, 113 aa, Homo sapiens
SLSASVGDRVTITCRASESISFYLNWYQQKPGKAPELLIFATSTLHSGVPSRFSGSGSGTDFTLTISSLQLEDFATYYCQQSSSTPFTFGGGTKVEIKRTVAAPSVFIFPPSD

SEQ ID NO: 519 - protein, 121 aa, Homo sapiens
DIQMTQSPSSLSAYVGDRVTITCRASQNINTYLNWYQQRPGKAPKLLIYAASTLQSGVPSRFSGSGSGTDFTLTISNLETEDFAVYYCQQTYRSVTFGQGTKLEIKRTVAAPSVFIFPPSD

SEQ ID NO: 520 - protein, 111 aa, Homo sapiens
LSAYVGDRVTITCRASQNINTYLNWYQQRPGKAPKLLIYAASTLQSGVPSRFSGSGSGTDFTLTISNLETEDFAVYYCQQTYSSVTFGQGTKLETRRTVAAPSVFIFPPSD

SEQ ID NO: 521 - protein, 125 aa, Homo sapiens
SEIVLTQSPGTLSLSPGERATLSCRASQSVSSSYLAWYQQKPVQAPRLLIYGASSRATGIPDRFSGSGSGTDFTLTISRLEPEDFAVYYCQQYGTLHPRTFGQGTKVEIKRTVAAPSVFIFPPSD

SEQ ID NO: 522 - protein, 122 aa, Homo sapiens
EIVLTQSPGTLSLSPGERATLSCRASQSISSNYLAWYQQKPGQAPRLLIYGASTRATGIPDRFSGSGSGTDFTLSISRLEPEDIAVYYCHQYGSSQRFGQGTKVEIKRTVAAPSVFIFPPSD

SEQ ID NO: 523 - protein, 122 aa, Homo sapiens
DIQMTQSPSSLSASVGDRVTITCRASQSISRYLNWYQQKPGKAPKLLIYAASSLQGGVPSRFSGSGSGTDFTLTISSLQPEDFATYYCQQSSSKPFTFGGGTKVEIKRTVAAPSVFIFPPSD

SEQ ID NO: 524 - protein, 129 aa, Homo sapiens
NFMLTQPASVSGSPGQSITISCSGTGSDIGVYNYVSWYQQHPGKAPRLMIYDVTNRPSGVSNRFSGSKSGFTASLTISGLQGDDEADYYCSSYSSTNTYVFGTGTHVTVLGQPKANPTVTLFPPSSEEL

SEQ ID NO: 525 - protein, 127 aa, Homo sapiens
QSALTQPPSASGTPGQRVTISCSGSYHNIGSNAVNWYQQLPGTAPKLLIYSNDQRPSGVPDRFSGSKSGTSASLAISGLQSEDEADYYCAAWDDSLHVFGTGTKVTVLGQPKANPTVTLFPPSSEEL

SEQ ID NO: 526 - protein, 127 aa, Homo sapiens; identical to SEQ ID NO: 525

SEQ ID NO: 527 - protein, 123 aa, Homo sapiens
DIQMTQSPSSLSASVGDRVTITCRASQDITTYLAWLQQKPGKAPKSLIYSASTVQSGVPSRFSGSGSGTEFTLTISGLQPEDFATYYCQQYNYYPITFGLGTRLEIKRTVAAPSVFIFPPSDE

SEQ ID NO: 528 - protein, 117 aa, Homo sapiens
IILFLVATATGSWAQSALTQPRSVSGSLGQSVTISCTGSSSDVGRYNYVSWYQHHPGKAPKLMISDVNKRPSGVPDRFSGSKSGNTASLTISGLQAEDETDYYCCSYAGSYIWVFGG

SEQ ID NO: 529 - protein, 125 aa, Homo sapiens
EIVLTQSPATLSLSPGERATLSCRASQSVSSYLAWYQQKPGQAPRLLIYDASNRATGIPARFSGSGSDTDFTLTISSLEPEDFAVYYCQQRGIWPLQITFGQGTRLEIKRTVAAPSVFIFPPSDE

SEQ ID NO: 530 - protein, 119 aa, Homo sapiens
LSASVGDRVTITCRASQSIDRYLNWYQQKPGKAPKLLIYAASSLHTDVPSRFSGSGAGTYFTLTITSLQPEDFATYYCQQSHSPSFGQESYSITFGQGTRLEIKRTVAAPSVFIFPPSD

SEQ ID NO: 531 - protein, 115 aa, Homo sapiens
VTLSLSPGERATLSCRASQTISNNYLAWYQQKPGQAPRLLIYGASSGATGLPDRFSGSGSGTDFTLTISRLEPEDFAVYYCHQYALSPWTFGRGTKVEIKRTVAAPSVFIFPPSD

SEQ ID NO: 532 - protein, 144 aa, Homo sapiens
IILFLVATATGVHSDIQMTQSPSSLSASVGDRVTITCRASQSIDRYLNWYQHKPGKAPKLLIYAASNLHTDVPSRFSGSGAGTYFTLTITSLQPEDFATYYCQQSHSPSFGQESYSIAFGQGTRLEIKRTVAAPSVFIFPPSDE

SEQ ID NO: 533 - protein, 113 aa, Homo sapiens
QSVLTQPASVSGSPGQSITISCTGTNSDVGYSYVSWFQQHPGKVPKLLIYDVSRRSSGVSNRFSGSRSGNTASLTISGLRAEDEADYYCGSFTTSLTLVFGGGTKLAVLVSPS

SEQ ID NO: 534 - protein, 124 aa, Homo sapiens
EIVLTQSPGTLSLSPGERATLSCRASQSVSSRYLAWYQQKPGQAPRLIIYDASSRASGIPDRFSGSGSETDFTLTITRLEPEDFAVYYCQLYGTSPKFTFGQGTKLEIKRTVAAPSVFIFPPSD

SEQ ID NO: 535 - protein, 90 aa, Homo sapiens
DVVMTQSPLSLPVTLGQPASISCRSSQSLVYSHGDTYLKCFQQRPGQSPRRPIYKVSNRDSGVPDRFSGSGSGTDFTLKISRVEAEDVGV

SEQ ID NO: 536 - protein, 116 aa, Homo sapiens
GPATLSVSPGERATLSCRASQSLRNNLAWYQQKTGQSPRLLIYAVSTRATGIPPRFSGGGSGTEFTLTIDSLQSEDFAVYFCQQYDSPQWTFGQGTKVEIKRTVAAPSVFIFPPSD

SEQ ID NO: 537 - protein, 120 aa, Homo sapiens
QSVLTQPASVSGSPGQSITISCTGTSNDVGGQNFVSWYQQHPGTAPQLLIYDVTNRPAGVSSRFSGSKSGNTASLTISGLRTEDEADYYCASFTILNGVDYVFGTGTKVTVLLSPSQPYL

SEQ ID NO: 538 - protein, 124 aa, Homo sapiens
EIVLTQSPATLSVSPGERATLSCRAGQSVSSDLAWYQHKPGQAPRLLIYDASKRATGIPARFSGSGSGTDFTLTISSLEPEDFAVYYCQHRTNWPPSITFGQGTRLEIKRTVAAPSVFIFPPSD

SEQ ID NO: 539 - protein, 119 aa, Homo sapiens
EIVLTQSPGTLSLSPGERATLSCRASQSVSSNYLAWYQQKPGQAPRLLIYGASSRATGIPDRFSGSGSGTDFTLSISRLEPEDFAVYYCQQYGTSSCTFGQGTKLEIKRTVAAPSVFIF

SEQ ID NO: 540 - protein, 123 aa, Homo sapiens
EIVLTQSPGTLSLSPGDRAALSCRASETLSGNSLAWYQQKRGQPPRLLIFAASSRATGIPERFSGGGSGTDFTLTITRLEPEDFAVYFCQQYVDAPITFGQGTRLEIKRTVAAPSVFIFPPSD

SEQ ID NO: 541 - protein, 121 aa, Homo sapiens
EIVLTQSPGTLSLSPGERATLSCRASQSVSSNNLAWYQQKPGQAPRLLMSGASSRATGIPDRFSGSGSGTDFTLTISRLEPEDFAVYHCQQYGSSPPTFGQGTKVEIKRTVAAPSVFIFPP

SEQ ID NO: 542 - protein, 119 aa, Homo sapiens
QSVLTQPRSVSGSPGQSVTISCTGTSSDVGGYNYVSWYQQHPGKAPKTMIFDVTKRPSGVPDRFSGSKSGNTASLTISGLQAEDEADYYCSSYAGRNTFYVFGTGTTVTVQVSPSQPPP

SEQ ID NO: 543 - protein, 123 aa, Homo sapiens
EIVLTQSPGTLSLSPGERATLSCRASQSVSSNLAWYAQKPGQAPRLIIYGASSRASAIPDRFRGSGSGTDFTLTISRLEPEDFAVYYCQQYDDAPITFGHGTRLEIKRTVAAPSVFIFPPSDE

SEQ ID NO: 544 - protein, 105 aa, Homo sapiens
DIQMTQSPSSLSASVGDKVTITCQTSAGYLNWYQQRRGRAPKLLMYDGSRLVTGVPSRFSGRRWGTQYNLTIGSLQPEDIATYYCQVYEFFGPGTRLDLKSTVAA

SEQ ID NO: 545 - protein, 104 aa, Homo sapiens
DIQMTQSPSSLSARVGDTVTITCQANGYLNWYQQRRGKAPKLLIYDGSKLERGVPARFSGRRWGQEYNLTINNLQPEDVATYFCQVYEFIVPGTRLDLKRTVAA

SEQ ID NO: 546 - protein, 121 aa, Homo sapiens
DIQMTQSPSSVSASVGDRVTITCQASRDTDNSLTWYQQKPGRPPKLLIYHVVNLGPGVPSRFSGSASSATQSTLIISDFQPDDVATYFCQNYEFFGPGTKVEIKRTVAAPSVFIFPPSDEQ

SEQ ID NO: 547 - protein, 114 aa, Homo sapiens
DIQMTQSPSSLSASVGDTVTITCQANGYLNWYQQRRGKAPKLLIYDGSKLERGVPSRFSGRRWGQEYNLTINNLQPEDIATYFCQVYEFVVPGTRLDLKRTVAAPSVFIFPPSD

SEQ ID NO: 548 - protein, 114 aa, Homo sapiens; identical to SEQ ID NO: 547

SEQ ID NO: 549 - protein, 114 aa, Homo sapiens
DIQMTQSPSSLSARVGDTVTFTCQANGYLNWYQQRRGKAPKLLIYDGSKLERGVPSRFSGRGWGQEYNLTINNLQPEDIATYFCQVYEFAVPGTRLDLKRTVAAPSVFIFPPSD

SEQ ID NO: 550 - protein, 114 aa, Homo sapiens
DIQMTQSPSSLSARVGDTVTITCQANGYLNWYQQRRGKAPKLLIYDGSKLETGVPSRFTGRRWGQEYNLTINNLQPEDIATYFCQVYEFIVPGTRLDLKRTVAAPSVFIFPPSD

SEQ ID NO: 551 - protein, 114 aa, Homo sapiens
DIQMTHSPSSLSASVGDTVTITCQANGYLNWYQQRRGKAPKLLIYDGSKLETGVPSRFTGRRWGQEYNLTINNLQPEDIATYFCQVYEFIVPGTRLDLKRTVAAPSVFIFPPSD

SEQ ID NO: 552 - protein, 114 aa, Homo sapiens; identical to SEQ ID NO: 550

SEQ ID NO: 553 - protein, 121 aa, Homo sapiens
DIQMTQSPSSLSASVGDRVTITCQASQGISNSLNWYQQKPGKAPRLLIYGTSTLQRGVPSRFSGSGSGTRFTVTINSLQPEDIATYFCQHNEFFGRGTKVDIKRTVAAPSVFIFPPSDEQL

SEQ ID NO: 554 - protein, 120 aa, Homo sapiens
DIQMTQSPSSLSASIGDRVNITCQASRDTGSALNWYQQKVGRPPRLLISAVSNLGAGVPSRFSGRRSGTQSTLTINTLQPEDIATYFCQHYEFFGPGTKVDIKRTVAAPSVFIFPPSDEQ

SEQ ID NO: 555 - protein, 114 aa, Homo sapiens
DIQMTQSPSSLSASVGDTVTFTCQANGYLNWYQQRRGKAPKLLIYDGSRLERGVPSRFSGRRWGQEYNLTINNLQPEDIATYFCQVYEFAVPGTRLDLKRTVAAPSVFIFPPSD

SEQ ID NO: 556 - protein, 115 aa, Homo sapiens
DIQMTQSPSSLSASVGDTVTITCQTNKGYLNWYQQRRGRAPKLLMYDGSKLVTGVPSRFSGRRWGTQYNLTIGSLQPEDIATYYCQVYEFFGPGTRLDLKRTVAAPSVFIFPPSD

SEQ ID NO: 557 - protein, 115 aa, Homo sapiens
DIQMTQSPSSLSARVGDKVTITYQTSAGYLNWYQQRRGRAPKLLMYDGSRLVTGAPSRFSGRRWGTQYNLTIGSLQPEDIATYYCQVYEFFGPGTRLDLKRTVAAPSVFIFPPSD

SEQ ID NO: 558 - protein, 114 aa, Homo sapiens; identical to SEQ ID NO: 547

SEQ ID NO: 559 - protein, 115 aa, Homo sapiens
DIQMTQSPSSLSASVGDTVTINCQTNKGYLNWYQQRRGRAPKLLMYDGSKLVTGVPSRFSGRRWGTQYNLTIGSLQPEDIATYYCQVYEFFGPGTRLDLKRTVAAPSVFIFPPSD

SEQ ID NO: 560 - protein, 115 aa, Homo sapiens
DIQMTQSPSSLSASVGDTVTITCHTNKGYLNWYQQRRGRAPKLLMFDGSKLVTGVPSRFSGRRWGTQYNLTIGSLQPEDIATYYCQVYEVFGPGTRLDLKRTVAAPSVFIFPPSD

SEQ ID NO: 561 - protein, 115 aa, Homo sapiens; identical to SEQ ID NO: 556

SEQ ID NO: 562 - protein, 115 aa, Homo sapiens
DIQMTQSPSSLSASVGDTVTITCQTNKGYLNWYQQRRGRAPKLLMYDGSKLVTGVPSRLSGRRWGTQYNLTIGSLQPEDIATYYCQVYEFFGPGTRLDLKRTVAAPSVFIFPPSD

SEQ ID NO: 563 - protein, 115 aa, Homo sapiens
DIQMTQSPSSLSASVGDTVTITCQTNKGYLNWYQQKRGRAPKLLMYDGSKLVTGVPSRLSGRRWGTQYNLTIGSLQPEDIATYYCQVYEFFGPGTRLDLKRTVAAPSVFIFPPSD

SEQ ID NO: 564 - protein, 115 aa, Homo sapiens; identical to SEQ ID NO: 562

SEQ ID NO: 565 - protein, 115 aa, Homo sapiens; identical to SEQ ID NO: 556

SEQ ID NO: 566 - protein, 115 aa, Homo sapiens; identical to SEQ ID NO: 562

SEQ ID NO: 567 - protein, 114 aa, Homo sapiens
DIQMTQSPSSLSASVGDTVTITCQANGYLNWYQQRRGKAPKLLIYDGSKLERGVPSRFSGRRWGQEYNLTINNLQAEDIATYFCQVYEFAVPGTRLDLKRTVAAPSVFIFPPSD

SEQ ID NO: 568 - protein, 115 aa, Homo sapiens
DIQMTQSPSSLSARVGDKVTITCQTSAGYLNWYQQRRGRAPKLLMYDGSRLVTGVPSRFSGRRWGTQYNLTIGSLQPEDIATYYCQVYEFFGPGTRLDLKRTVAAPSVFIFPPSD

SEQ ID NO: 569 - protein, 114 aa, Homo sapiens
DIQMTQSPSSLSASVGDTVTITCQANGYLNWYQQRRGKAPKLLMYDGSTLERGVPARFSGRRWGQEYNLTINNLQPEDVATYFCQVYEFIVPGTRLDLKRTVAAPSVFIFPPSD

SEQ ID NO: 570 - protein, 115 aa, Homo sapiens
DIQMTQSPSSLSASVGDTVTITCQTNKGYLNWYQQRRGRAPKLLMCDGSKLVTGVPSRFSGRRWGTQYNLTIGSLQPEDIATYYCQVYEFFGPGTRLDLKRTVAAPSVFIFPPSD

SEQ ID NO: 571 - protein, 115 aa, Homo sapiens
DIQMTQSPSSLSASVGDTVTITCQTTKGYLNWYQQRRGRAPKLLMFDGSKLVTGVPSRFSGRRWGTQYNLTIGSLQPEDLATYYCQVYEFFGPGTRLDLKRTVAAPSVFIFPPSD

SEQ ID NO: 572 - protein, 115 aa, Homo sapiens; identical to SEQ ID NO: 560

SEQ ID NO: 573 - protein, 114 aa, Homo sapiens; identical to SEQ ID NO: 550

SEQ ID NO: 574 - protein, 114 aa, Homo sapiens
DIQMTQSPSSLSARVGDTVTFTCQANGYLNWYQQRRGKAPKLLIYDGSKLERGVPSRFSGRRWGQEYNLTINNLQPEDIATYFCQVYEFAVPGTRLDLKRTVAAPSVFIFPPSD

SEQ ID NO: 575 - protein, 115 aa, Homo sapiens; identical to SEQ ID NO: 562

SEQ ID NO: 576 - protein, 114 aa, Homo sapiens
DIQMTQSPSSLSARVGDTVTITCQANGYLNWYQQRRGKAPKLLIYDGSKLERGVPSRFSGRRWGQEYNLTINNLQPEDIATYFCQVYEFVVPGTRLDLKRTVAAPSVFIFPPSD

SEQ ID NO: 577 - protein, 113 aa, Homo sapiens
DIQMTQSPSSLSARVGDTVTFTCQANGYLNWYQQRRGKAPKLLIYDGSKLERGVPSRFSGRRWGQEYNLTINNLQPEDIATYFCQVYEFAVPGTRLDLKRTVAAPSVFIFPSD

SEQ ID NO: 578 - protein, 108 aa, Homo sapiens
DIQMTQSPSSLSASVGDTVTINCQTNKGYLNWYQQRRGRAPKLLMYDGSKLVTGVPSRFSGRRWGTQYNLTIGSLQPEDIATYYCQVYEFFGPGTRLDLKRTVAAPSD

SEQ ID NO: 579 - protein, 115 aa, Homo sapiens; identical to SEQ ID NO: 559

SEQ ID NO: 580 - protein, 114 aa, Homo sapiens; identical to SEQ ID NO: 576

SEQ ID NO: 581 - protein, 115 aa, Homo sapiens
DIQMTQSPSSLSASVGDKVTITCQTSAGYLNWYQQRRGRAPKLLMYDGSRLVTGVPSRFSGRRWGTQYNLTIGSLQPEDVATYYCQVYEFFGPGTRLDLKRTVAAPSVFIFPPSD

SEQ ID NO: 582 - protein, 114 aa, Homo sapiens
DIQMTQSPSSLSARVGDTVTITCQANGYLNWYQQRRGKAPKLLIYDGSKLERGVPSRFSGRRWGQEYNLTINNLQPEDIATYFCQVYEFAVPGTRLDLKRTVAAPSVFIFPPSD

SEQ ID NO: 583 - protein, 114 aa, Homo sapiens
DIQMTQSPSSLSASVGDTVTITCQANGYLNWYQQRRGKAPKLLIYDGSKLERGVPSRFSGRRWGQEYNLTINNLQPEDIATYFCQVYEFIVPGTRLDLKRTVAAPSVFIFPPSD

SEQ ID NO: 584 - DNA, 36 bp, Artificial
  Synthetic forward primer
ctgcaaccggtgtacattctcaagtgcaactggtgc

SEQ ID NO: 585 - DNA, 38 bp, Artificial
  Synthetic forward primer
ctgcaaccggtgtacattctcaggtccatttgtcacag

SEQ ID NO: 586 - DNA, 33 bp, Artificial
  Synthetic reverse primer
tgcgaagtcgacgctgacgagacagtgacctgc

SEQ ID NO: 587 - DNA, 32 bp, Artificial
  Synthetic reverse primer
tgcgaagtcgacgctgaagagacaataatttg

SEQ ID NO: 588 - DNA, 30 bp, Artificial
  Synthetic reverse primer
tgcgaagtcgacgctgacgagacaataact

SEQ ID NO: 589 - DNA, 35 bp, Artificial
  Synthetic forward primer
ctgcaaccggtgtacattttcaggggcacttggtg

SEQ ID NO: 590 - DNA, 33 bp, Artificial
  Synthetic reverse primer
tgcgaagtcgacgctgaggtgacgatgaccgtg

SEQ ID NO: 591 - DNA, 20 bp, Artificial
  Synthetic forward leader primer
atggactggacctggaggat

SEQ ID NO: 592 - DNA, 20 bp, Artificial
  Synthetic forward leader primer
atggactggacctggagcat

SEQ ID NO: 593 - DNA, 20 bp, Artificial
  Synthetic forward leader primer
atggactggacctggacaat

SEQ ID NO: 594 - DNA, 20 bp, Artificial
  Synthetic forward leader primer
ggccttctctttgtggtggc

SEQ ID NO: 595 - DNA, 20 bp, Artificial
  Synthetic forward leader primer
atggactggacctggagggt

SEQ ID NO: 596 - DNA, 20 bp, Artificial
  Synthetic forward leader primer
atggactggatttggaggat

SEQ ID NO: 597 - DNA, 22 bp, Artificial
  Synthetic forward leader primer
aggttcctctttgtggtggcag

SEQ ID NO: 598 - DNA, 17 bp, Artificial
  Synthetic forward leader primer
taaaaggtgtccagtgt

SEQ ID NO: 599 - DNA, 17 bp, Artificial
  Synthetic forward leader primer
taagaggtgtccagtgt

SEQ ID NO: 600 - DNA, 17 bp, Artificial
  Synthetic forward leader primer
tagaaggtgtccagtgt

SEQ ID NO: 601 - DNA, 24 bp, Artificial
  Synthetic forward leader primer
gctatttttaaaggtgtccagtgt

SEQ ID NO: 602 - DNA, 17 bp, Artificial
  Synthetic forward leader primer
tacaaggtgtccagtgt

SEQ ID NO: 603 - DNA, 17 bp, Artificial
  Synthetic forward leader primer
ttaaagctgtccagtgt

SEQ ID NO: 604 - DNA, 22 bp, Artificial
  Synthetic forward leader primer
atgaaacacctgtggttcttcc

SEQ ID NO: 605 - DNA, 18 bp, Artificial
  Synthetic forward leader primer
atgaaacacctgtttctt

SEQ ID NO: 606 - DNA, 20 bp, Artificial
  Synthetic forward leader primer
atgaagcacctgtggttctt

SEQ ID NO: 607 - DNA, 20 bp, Artificial
  Synthetic forward leader primer
atgaaacatctgtggttctt

SEQ ID NO: 608 - DNA, 17 bp, Artificial
  Synthetic forward leader primer
ttctccaaggagtctgt

SEQ ID NO: 609 - DNA, 19 bp, Artificial
  Synthetic forward leader primer
cctccacagtgagagtctg

SEQ ID NO: 610 - DNA, 21 bp, Artificial
  Synthetic forward leader primer
atgtctgtctccttcctcatc

SEQ ID NO: 611 - DNA, 21 bp, Artificial
  Synthetic forward leader primer
ggcagcagcaacaggtgccca

SEQ ID NO: 612 - DNA, 23 bp, Artificial
  Synthetic reverse constant region primers
ggaaggtgtgcacgccgctggtc

SEQ ID NO: 613 - DNA, 22 bp, Artificial
  Synthetic reverse constant region primers
gttcggggaagtagtccttgac

SEQ ID NO: 614 - protein, 10 aa, Homo sapiens
RHSDYCDFDV

SEQ ID NO: 615 - protein, 10 aa, Homo sapiens
QRSDFWDFDV

SEQ ID NO: 616 - protein, 10 aa, Homo sapiens
RHSDYCDFDV

SEQ ID NO: 617 - protein, 10 aa, Homo sapiens
RHSDYCDFDV

SEQ ID NO: 618 - protein, 10 aa, Homo sapiens
RHSDYCDFDI

SEQ ID NO: 619 - protein, 10 aa, Homo sapiens
QRSDYWDFDV

SEQ ID NO: 620 - protein, 10 aa, Homo sapiens
QRSDYWDFDV

SEQ ID NO: 621 - protein, 10 aa, Homo sapiens
RHTDYCDFDV

SEQ ID NO: 622 - protein, 10 aa, Homo sapiens
RHSDYCDFDV

SEQ ID NO: 623 - protein, 10 aa, Homo sapiens
QRSDYWDFDV

SEQ ID NO: 624 - protein, 10 aa, Homo sapiens
RHSDYCDFDV

SEQ ID NO: 625 - protein, 10 aa, Homo sapiens
RHSDYCDFDI

SEQ ID NO: 626 - protein, 10 aa, Homo sapiens
RRSDYCDFDV

SEQ ID NO: 627 - protein, 10 aa, Homo sapiens
QRSDYWDFDV

SEQ ID NO: 628 - protein, 10 aa, Homo sapiens
QRSDYWDFDV

SEQ ID NO: 629 - protein, 10 aa, Homo sapiens
RHSDYCDFDV

SEQ ID NO: 630 - protein, 10 aa, Homo sapiens
RHSDYCDFDI

SEQ ID NO: 631 - protein, 10 aa, Homo sapiens
QRSDYWDFDV

SEQ ID NO: 632 - protein, 10 aa, Homo sapiens
RHSDYCDFDV

SEQ ID NO: 633 - protein, 10 aa, Homo sapiens
RHSDYCDFDV

SEQ ID NO: 634 - protein, 10 aa, Homo sapiens
RHSDYCDLDV

SEQ ID NO: 635 - protein, 10 aa, Homo sapiens
RHSDYCDFDV

SEQ ID NO: 636 - protein, 10 aa, Homo sapiens
RHSDYCDFDV

SEQ ID NO: 637 - protein, 10 aa, Homo sapiens
QRSDYWDFDV

SEQ ID NO: 638 - protein, 10 aa, Homo sapiens
QRSDYWDFDV

SEQ ID NO: 639 - protein, 12 aa, Homo sapiens
PLRGGDTWHYHS

SEQ ID NO: 640 - protein, 12 aa, Homo sapiens
PLRGGDTWHYHS

SEQ ID NO: 641 - protein, 12 aa, Homo sapiens
PHSPDDAWSLDV

SEQ ID NO: 642 - protein, 12 aa, Homo sapiens
PHSPDDAWSLDV

SEQ ID NO: 643 - protein, 12 aa, Homo sapiens
PHSPDDAWSLDV

SEQ ID NO: 644 - protein, 12 aa, Homo sapiens
PRGGRDNWSFHV

SEQ ID NO: 645 - protein, 12 aa, Homo sapiens
PKSGRDYWSFDL

SEQ ID NO: 646 - protein, 14 aa, Homo sapiens
ATGYSYGYLDAFDI

SEQ ID NO: 647 - protein, 14 aa, Homo sapiens
EPREMGTLTAGFEY

SEQ ID NO: 648 - protein, 20 aa, Homo sapiens
GQTDLNDDLWSDYSTPGFDY

SEQ ID NO: 649 - protein, 20 aa, Homo sapiens
GQTDLNDDFWSEYSTPGFDY

SEQ ID NO: 650 - protein, 20 aa, Homo sapiens
GEFDSSGFDYESWYPYYMDV

SEQ ID NO: 651 - protein, 15 aa, Homo sapiens
APRLELGELSSGFHY

SEQ ID NO: 652 - protein, 15 aa, Homo sapiens
APRLDLGELSSGFHF

SEQ ID NO: 653 - protein, 15 aa, Homo sapiens
APRLDLGELSSGFHF

SEQ ID NO: 654 - protein, 16 aa, Homo sapiens
DNPLLQSGEFSSSLDN

SEQ ID NO: 655 - protein, 16 aa, Homo sapiens
DNPLLQSGEFSSSLEN

SEQ ID NO: 656 - protein, 13 aa, Homo sapiens
AQGDILTEGYFDY

SEQ ID NO: 657 - protein, 5 aa, Homo sapiens
QVYEF

SEQ ID NO: 658 - protein, 5 aa, Homo sapiens
QVYEF

SEQ ID NO: 659 - protein, 5 aa, Homo sapiens
QVYEF

SEQ ID NO: 660 - protein, 5 aa, Homo sapiens
QVYEV

SEQ ID NO: 661 - protein, 5 aa, Homo sapiens
QVYEF

SEQ ID NO: 662 - protein, 5 aa, Homo sapiens
QVYEF

SEQ ID NO: 663 - protein, 5 aa, Homo sapiens
QVYEF

SEQ ID NO: 664 - protein, 5 aa, Homo sapiens
QVYEF

SEQ ID NO: 665 - protein, 5 aa, Homo sapiens
QVYEF

SEQ ID NO: 666 - protein, 5 aa, Homo sapiens
QVYEF

SEQ ID NO: 667 - protein, 5 aa, Homo sapiens
QVYEF

SEQ ID NO: 668 - protein, 5 aa, Homo sapiens
QVYEF

SEQ ID NO: 669 - protein, 5 aa, Homo sapiens
QVYEF

SEQ ID NO: 670 - protein, 5 aa, Homo sapiens
QVYEF

SEQ ID NO: 671 - protein, 5 aa, Homo sapiens
QVYEF

SEQ ID NO: 672 - protein, 5 aa, Homo sapiens
QVYEF

SEQ ID NO: 673 - protein, 5 aa, Homo sapiens
QVYEF

SEQ ID NO: 674 - protein, 5 aa, Homo sapiens
QVYEF

SEQ ID NO: 675 - protein, 5 aa, Homo sapiens
QVYEV

SEQ ID NO: 676 - protein, 5 aa, Homo sapiens
QVYEF

SEQ ID NO: 677 - protein, 5 aa, Homo sapiens
QVYEF

SEQ ID NO: 678 - protein, 5 aa, Homo sapiens
QVYEF

SEQ ID NO: 679 - protein, 5 aa, Homo sapiens
QVYEF

SEQ ID NO: 680 - protein, 5 aa, Homo sapiens
QVYEF

SEQ ID NO: 681 - protein, 5 aa, Homo sapiens
QHYEF

SEQ ID NO: 682 - protein, 5 aa, Homo sapiens
QHYEF

SEQ ID NO: 683 - protein, 5 aa, Homo sapiens
QHYEF

SEQ ID NO: 684 - protein, 5 aa, Homo sapiens
QQYEF

SEQ ID NO: 685 - protein, 9 aa, Homo sapiens
AAWDDTLYV

SEQ ID NO: 686 - protein, 11 aa, Homo sapiens
QHRSIWPLMCT

SEQ ID NO: 687 - protein, 9 aa, Homo sapiens
GAWDDTLYV

SEQ ID NO: 688 - protein, 16 aa, Homo sapiens
AEAESQSHSRPIMFDF

SEQ ID NO: 689 - protein, 16 aa, Homo sapiens
AEAESQSHSRPIMFDS

SEQ ID NO: 690 - protein, 19 aa, Homo sapiens
QDSDFHDGHGHTLRGMFDS

SEQ ID NO: 691 - protein, 14 aa, Homo sapiens
NEPQYHSLPGMFDY

SEQ ID NO: 692 - protein, 19 aa, Homo sapiens
NEPQYHDGNGHSLPGMFDY

SEQ ID NO: 693 - protein, 19 aa, Homo sapiens
NEPQYYDGSGHSLPGMFDY

SEQ ID NO: 694 - protein, 15 aa, Homo sapiens
LEADGDDYSPKMVDY

SEQ ID NO: 695 - protein, 19 aa, Homo sapiens
READYHDGNGHTLPGMFDF

SEQ ID NO: 696 - protein, 19 aa, Homo sapiens
NEPQYFDGSGHSLPGMFDY

SEQ ID NO: 697 - protein, 19 aa, Homo sapiens
NEPQYYDGSGHSLPGMFDY

SEQ ID NO: 698 - protein, 15 aa, Homo sapiens
LEADGDDYSPKMFDH

SEQ ID NO: 699 - protein, 16 aa, Homo sapiens
LEAESDSHSRPIMFDH

SEQ ID NO: 700 - protein, 19 aa, Homo sapiens
NEPQYHDGNGHSLPGMFDF

SEQ ID NO: 701 - protein, 19 aa, Homo sapiens
NEPQYYDGSGHSLPGMFDY

SEQ ID NO: 702 - protein, 16 aa, Homo sapiens
AEAESQSHSRPIMFDF

SEQ ID NO: 703 - protein, 16 aa, Homo sapiens
AEAASDSHSRPIMFDH

SEQ ID NO: 704 - protein, 15 aa, Homo sapiens
LEADGSDYSPKMFDF

SEQ ID NO: 705 - protein, 15 aa, Homo sapiens
LEADGDDYSPKMFDY

SEQ ID NO: 706 - protein, 19 aa, Homo sapiens
READYHDGNGHTLPGMFDF

SEQ ID NO: 707 - protein, 15 aa, Homo sapiens
LEADGDDYSPKMFDY

SEQ ID NO: 708 - protein, 15 aa, Homo sapiens
LEADGDNYSPKMVDY

SEQ ID NO: 709 - protein, 14 aa, Homo sapiens
NEPQYHSLPGMFDY

SEQ ID NO: 710 - protein, 15 aa, Homo sapiens
LEADGGDYSPKMFDY

SEQ ID NO: 711 - protein, 15 aa, Homo sapiens
LEADGADYSPKMFDF

SEQ ID NO: 712 - protein, 16 aa, Homo sapiens
AEAESQSHSRPIMFDY

SEQ ID NO: 713 - protein, 16 aa, Homo sapiens
AEAASDSHSRPIMFDH

SEQ ID NO: 714 - protein, 16 aa, Homo sapiens
LEAESDSHSRPIMFDH

SEQ ID NO: 715 - protein, 19 aa, Homo sapiens
NEPQYHDDNGHSLPGMIDY

SEQ ID NO: 716 - protein, 16 aa, Homo sapiens
AEAESQSHSRPIMFDS

SEQ ID NO: 717 - protein, 19 aa, Homo sapiens
NEPQYHDGNGHSLPGMFDS

SEQ ID NO: 718 - protein, 18 aa, Homo sapiens
GRQTFRAIWSGPPVVFDI

SEQ ID NO: 719 - protein, 18 aa, Homo sapiens
GRQTFRAIWSGPPAVFDI

SEQ ID NO: 720 - protein, 16 aa, Homo sapiens
AVAGLWFEDAYNWFGP

SEQ ID NO: 721 - protein, 16 aa, Homo sapiens
AVKGLWFDETYTWFGP

SEQ ID NO: 722 - protein, 16 aa, Homo sapiens
AVKGFWFDEPSTWFGP

SEQ ID NO: 723 - protein, 16 aa, Homo sapiens
AVKGFWFDDPYTWFGP

SEQ ID NO: 724 - protein, 16 aa, Homo sapiens
AVKGFWFDEVYNWFGP

SEQ ID NO: 725 - protein, 11 aa, Homo sapiens
AVYDSSLSLGL

SEQ ID NO: 726 - protein, 11 aa, Homo sapiens
ATYDSQRSIRL

SEQ ID NO: 727 - protein, 11 aa, Homo sapiens
ATYDSQGSTRL

SEQ ID NO: 728 - protein, 11 aa, Homo sapiens
AAYDSTFSLPV

SEQ ID NO: 729 - protein, 11 aa, Homo sapiens
AAYDSSLSLRL

SEQ ID NO: 730 - protein, 11 aa, Homo sapiens
ATYDTDLSLRL

SEQ ID NO: 731 - protein, 11 aa, Homo sapiens
AAYDSAVSLPV

SEQ ID NO: 732 - protein, 11 aa, Homo sapiens
AAYDSTLSLRL

SEQ ID NO: 733 - protein, 11 aa, Homo sapiens
AAYDSTFSLPV

SEQ ID NO: 734 - protein, 11 aa, Homo sapiens
ATYDTGLSLRL

SEQ ID NO: 735 - protein, 11 aa, Homo sapiens
ATYDSGWSIRL

SEQ ID NO: 736 - protein, 11 aa, Homo sapiens
AAYDSTLSLRL

SEQ ID NO: 737 - protein, 11 aa, Homo sapiens
AAYDSTLSLRL

SEQ ID NO: 738 - protein, 11 aa, Homo sapiens
ATYDSQGSTRL

SEQ ID NO: 739 - protein, 11 aa, Homo sapiens
ATYDSDGSIRL

SEQ ID NO: 740 - protein, 11 aa, Homo sapiens
ATYDTGLSLRL

SEQ ID NO: 741 - protein, 11 aa, Homo sapiens
AAFDSALSLPL

SEQ ID NO: 742 - protein, 11 aa, Homo sapiens
ATYDTGLSLRL

SEQ ID NO: 743 - protein, 11 aa, Homo sapiens
GTYDTSLSLRL

SEQ ID NO: 744 - protein, 11 aa, Homo sapiens
ATYDSHGSIRL

SEQ ID NO: 745 - protein, 11 aa, Homo sapiens
ATYDSDGSIRL

SEQ ID NO: 746 - protein, 11 aa, Homo sapiens
ATYDSGWSIRL

SEQ ID NO: 747 - protein, 16 aa, Homo sapiens
DGLGEVAPAYLYGIDA

SEQ ID NO: 748 - protein, 16 aa, Homo sapiens
DGLGEVAPAYLYGIDA

SEQ ID NO: 749 - protein, 16 aa, Homo sapiens
DGLGEVAPAYLYGIDA

SEQ ID NO: 750 - protein, 16 aa, Homo sapiens
DGLGELAPAYHYGIDV

SEQ ID NO: 751 - protein, 16 aa, Homo sapiens
DGLGELAPAYQYGIDV

SEQ ID NO: 752 - protein, 16 aa, Homo sapiens
DGLGEVAPDYRYGIDV

SEQ ID NO: 753 - protein, 16 aa, Homo sapiens
DGLGEVAPAYLYGIDA

SEQ ID NO: 754 - protein, 16 aa, Homo sapiens
DGLGEVAPDYRYGIDV

SEQ ID NO: 755 - protein, 20 aa, Homo sapiens
TSTYDQWSGLHHDGVMAFSS

SEQ ID NO: 756 - protein, 11 aa, Homo sapiens
SSGNFEFAFEI

SEQ ID NO: 757 - protein, 11 aa, Homo sapiens
SSGNYDFAYDI

SEQ ID NO: 758 - protein, 11 aa, Homo sapiens
SSGNYDFAFDI

SEQ ID NO: 759 - protein, 18 aa, Homo sapiens
ADRFKVAQDEGLFVIFDY

SEQ ID NO: 760 - protein, 18 aa, Homo sapiens
ADPFKVAQDEGLYVIFDY

SEQ ID NO: 761 - protein, 18 aa, Homo sapiens
ADPFKVAQDEGLYVIFDY

SEQ ID NO: 762 - protein, 18 aa, Homo sapiens
ADPFKVAQDEGLFVIFDY

SEQ ID NO: 763 - protein, 24 aa, Homo sapiens
DRGDTRLLDYGDYEDERYYYGMDV

SEQ ID NO: 764 - protein, 24 aa, Homo sapiens
DRGDTRLLDYGDYEDERYYYGMDV

SEQ ID NO: 765 - protein, 24 aa, Homo sapiens
DRGDTRLLDYGDYEDERYYYGMDV

SEQ ID NO: 766 - protein, 24 aa, Homo sapiens
DRGDTRLLDYGDYEDERYYYGMDV

SEQ ID NO: 767 - protein, 24 aa, Homo sapiens
DRGDTRLLDYGDYEDERYYYGMDV

SEQ ID NO: 768 - protein, 24 aa, Homo sapiens
DRGDTRLLDYGDYEDERYYYGMDV

SEQ ID NO: 769 - protein, 24 aa, Homo sapiens
DRGDTRLLDYGDYEDERYYYGMDV

SEQ ID NO: 770 - protein, 21 aa, Homo sapiens
DRSSAIGYCSSISCYKGSFDI

SEQ ID NO: 771 - protein, 14 aa, Homo sapiens
GGLYCSSISCIMDV

SEQ ID NO: 772 - protein, 14 aa, Homo sapiens
GGLYCSSISCIMDV

SEQ ID NO: 773 - protein, 5 aa, Homo sapiens
NGFDV

SEQ ID NO: 774 - protein, 9 aa, Homo sapiens
QEYSSTPYN

SEQ ID NO: 775 - protein, 9 aa, Homo sapiens
QEYSSTPYN

SEQ ID NO: 776 - protein, 9 aa, Homo sapiens
QEYSSTPYN

SEQ ID NO: 777 - protein, 9 aa, Homo sapiens
QEYSSTPYN

SEQ ID NO: 778 - protein, 9 aa, Homo sapiens
QEYSSTPYN

SEQ ID NO: 779 - protein, 9 aa, Homo sapiens
QEYSSTPYN

SEQ ID NO: 780 - protein, 9 aa, Homo sapiens
QEYSSTPYN

SEQ ID NO: 781 - protein, 9 aa, Homo sapiens
QQYDTYPGT

SEQ ID NO: 782 - protein, 11 aa, Homo sapiens
QSYDRSLRGSV

SEQ ID NO: 783 - protein, 10 aa, Homo sapiens
QQRANWRLLT

SEQ ID NO: 784 - protein, 9 aa, Homo sapiens
QQYSNLPYT

SEQ ID NO: 785 - protein, 10 aa, Homo sapiens
QQYYQWLSYT

SEQ ID NO: 786 - protein, 9 aa, Homo sapiens
QQYNHWPQT

SEQ ID NO: 787 - protein, 9 aa, Homo sapiens
CLKKTSSYV

SEQ ID NO: 788 - protein, 13 aa, Homo sapiens
DGSGDDTSWHLHP

SEQ ID NO: 789 - protein, 13 aa, Homo sapiens
DESGDDLKWHLHP

SEQ ID NO: 790 - protein, 13 aa, Homo sapiens
DGSGDATSWHLHP

SEQ ID NO: 791 - protein, 13 aa, Homo sapiens
DGSGDARDWHLDP

SEQ ID NO: 792 - protein, 13 aa, Homo sapiens
DRRDDDRAWLLDP

SEQ ID NO: 793 - protein, 13 aa, Homo sapiens
DGSGDDTSWHLDP

SEQ ID NO: 794 - protein, 13 aa, Homo sapiens
DGSGDDTSWYLDP

SEQ ID NO: 795 - protein, 13 aa, Homo sapiens
DGSGDARDWHLHP

SEQ ID NO: 796 - protein, 13 aa, Homo sapiens
DGGGDDRTWLLDA

SEQ ID NO: 797 - protein, 13 aa, Homo sapiens
DRRDDGLDWLLDP

SEQ ID NO: 798 - protein, 13 aa, Homo sapiens
DGSGDDTSWHLHP

SEQ ID NO: 799 - protein, 12 aa, Homo sapiens
GGGDGRNWHLHP

SEQ ID NO: 800 - protein, 13 aa, Homo sapiens
DGSGDDRNWHLDP

SEQ ID NO: 801 - protein, 13 aa, Homo sapiens
DESGYDLNWHLDS

SEQ ID NO: 802 - protein, 5 aa, Homo sapiens
AVLEF

SEQ ID NO: 803 - protein, 5 aa, Homo sapiens
AVFQW

SEQ ID NO: 804 - protein, 5 aa, Homo sapiens
AVLEF

SEQ ID NO: 805 - protein, 5 aa, Homo sapiens
AVLEF

SEQ ID NO: 806 - protein, 5 aa, Homo sapiens
QLFEF

SEQ ID NO: 807 - protein, 5 aa, Homo sapiens
AVLEF

SEQ ID NO: 808 - protein, 5 aa, Homo sapiens
AVVEF

SEQ ID NO: 809 - protein, 5 aa, Homo sapiens
AALEF

SEQ ID NO: 810 - protein, 5 aa, Homo sapiens
SVYEF

SEQ ID NO: 811 - protein, 5 aa, Homo sapiens
QLFEF

SEQ ID NO: 812 - protein, 5 aa, Homo sapiens
AVLEF

SEQ ID NO: 813 - protein, 5 aa, Homo sapiens
ASLEF

SEQ ID NO: 814 - protein, 5 aa, Homo sapiens
EVYEF

SEQ ID NO: 815 - protein, 5 aa, Homo sapiens
ESFQW

SEQ ID NO: 816 - protein, 10 aa, Homo sapiens
QRSDYWDFDV

SEQ ID NO: 817 - protein, 18 aa, Homo sapiens
IPYHSESYYKVVIGGFDV

SEQ ID NO: 818 - protein, 13 aa, Homo sapiens
DHGDPRTGYYFDY

SEQ ID NO: 819 - protein, 9 aa, Homo sapiens
GPLLRYLDS

SEQ ID NO: 820 - protein, 22 aa, Homo sapiens
KAKDYYYESSDYSPYYYYYMDV

SEQ ID NO: 821 - protein, 15 aa, Homo sapiens
GSGRWTIGARIYFDN

SEQ ID NO: 822 - protein, 18 aa, Homo sapiens
TPPHYDVLTGYPSSVLEF

SEQ ID NO: 823 - protein, 14 aa, Homo sapiens
ATGYSYGYLDAFDI

SEQ ID NO: 824 - protein, 15 aa, Homo sapiens
EKGQWLTVPPYYFDS

SEQ ID NO: 825 - protein, 14 aa, Homo sapiens
TRCFGANCFNFMDV

SEQ ID NO: 826 - protein, 12 aa, Homo sapiens
PEPSSIVAPLYY

SEQ ID NO: 827 - protein, 13 aa, Homo sapiens
DPQVEVRGNAFDI

SEQ ID NO: 828 - protein, 12 aa, Homo sapiens
PQYNLGRDPLDV

SEQ ID NO: 829 - protein, 14 aa, Homo sapiens
ADYDLLTSSYHFDS

SEQ ID NO: 830 - protein, 12 aa, Homo sapiens
LDGEAFRYYLDL

SEQ ID NO: 831 - protein, 5 aa, Homo sapiens
QVYEF

SEQ ID NO: 832 - protein, 5 aa, Homo sapiens
QQLAT

SEQ ID NO: 833 - protein, 9 aa, Homo sapiens
QQYDDAPIT

SEQ ID NO: 834 - protein, 11 aa, Homo sapiens
QHRTNWPPSIT

SEQ ID NO: 835 - protein, 9 aa, Homo sapiens
QQYGTSSCT

SEQ ID NO: 836 - protein, 9 aa, Homo sapiens
QQYGSSPPT

SEQ ID NO: 837 - protein, 10 aa, Homo sapiens
QQYNNWPPIT

SEQ ID NO: 838 - protein, 9 aa, Homo sapiens
AAWDDTLYV

SEQ ID NO: 839 - protein, 7 aa, Homo sapiens
QQSHSPS

SEQ ID NO: 840 - protein, 7 aa, Homo sapiens
QQYYISP

SEQ ID NO: 841 - protein, 10 aa, Homo sapiens
QQYGTLHPRT

SEQ ID NO: 842 - protein, 9 aa, Homo sapiens
QQTYTSPIT

SEQ ID NO: 843 - protein, 9 aa, Homo sapiens
QQYGLSPWT

SEQ ID NO: 844 - protein, 11 aa, Homo sapiens
LLLPYYGGPWI

SEQ ID NO: 845 - protein, 10 aa, Homo sapiens
SSFTPTNTLV

SEQ ID NO: 846 - protein, 19 aa, Homo sapiens
NEADYHDGNGHSLRGMFDY

SEQ ID NO: 847 - protein, 18 aa, Homo sapiens
GRQTFRAIWSGPPVVFDI

SEQ ID NO: 848 - protein, 17 aa, Homo sapiens
RYFDWSPFRRDTYGTDV

SEQ ID NO: 849 - protein, 17 aa, Homo sapiens
RYLDWSPIGRDTYGTDV

SEQ ID NO: 850 - protein, 18 aa, Homo sapiens
GLCRGGNCRLGPSGWLDP

SEQ ID NO: 851 - protein, 14 aa, Homo sapiens
VAYVHVVTTRSLDN

SEQ ID NO: 852 - protein, 20 aa, Homo sapiens
HEAPRYSYAFRRYYHYGLDV

SEQ ID NO: 853 - protein, 16 aa, Homo sapiens
VISGRITIFYYNYIDV

SEQ ID NO: 854 - protein, 14 aa, Homo sapiens
GTLWFGESGLRLDH

SEQ ID NO: 855 - protein, 18 aa, Homo sapiens
NRRVAMPEAMILSFYMDV

SEQ ID NO: 856 - protein, 18 aa, Homo sapiens
VVPMFSIFGVVKANYFDY

SEQ ID NO: 857 - protein, 19 aa, Homo sapiens
AGLDYNFWNGKGRKGAFDV

SEQ ID NO: 858 - protein, 16 aa, Homo sapiens
GFRGSPFSSGSLYFDS

SEQ ID NO: 859 - protein, 24 aa, Homo sapiens
AVITDLHTFGDYELEDPSYYYMDV

SEQ ID NO: 860 - protein, 9 aa, Homo sapiens
RGRRQIGDY

SEQ ID NO: 861 - protein, 16 aa, Homo sapiens
SYYDFSIGDGNDAFDV

SEQ ID NO: 862 - protein, 19 aa, Homo sapiens
DTTTFTTFGGGPNMGGFDP

SEQ ID NO: 863 - protein, 11 aa, Homo sapiens
AVYDSSLSLGL

SEQ ID NO: 864 - protein, 9 aa, Homo sapiens
QHRSNWPWT

SEQ ID NO: 865 - protein, 9 aa, Homo sapiens
HQYFSTPRT

SEQ ID NO: 866 - protein, 9 aa, Homo sapiens
HQYFNTPRT

SEQ ID NO: 867 - protein, 9 aa, Homo sapiens
QQYEDPPWT

SEQ ID NO: 868 - protein, 9 aa, Homo sapiens
QQTYSNPRM

SEQ ID NO: 869 - protein, 11 aa, Homo sapiens
ASWDDSLSGWV

SEQ ID NO: 870 - protein, 11 aa, Homo sapiens
ASWDNSLSGPV

SEQ ID NO: 871 - protein, 9 aa, Homo sapiens
QQYNSFPPT

SEQ ID NO: 872 - protein, 7 aa, Homo sapiens
QQYGRSP

SEQ ID NO: 873 - protein, 11 aa, Homo sapiens
GTWDSSLSAVL

SEQ ID NO: 874 - protein, 5 aa, Homo sapiens
QQYDS

SEQ ID NO: 875 - protein, 9 aa, Homo sapiens
HQYAYSPRT

SEQ ID NO: 876 - protein, 9 aa, Homo sapiens
QQYKSYSGT

SEQ ID NO: 877 - protein, 10 aa, Homo sapiens
QHSFGSPPWT

SEQ ID NO: 878 - protein, 10 aa, Homo sapiens
AAWDDSFDYV

SEQ ID NO: 879 - protein, 5 aa, Homo sapiens
QQLRT

SEQ ID NO: 880 - protein, 11 aa, Homo sapiens
QQRTIWPPGCS

SEQ ID NO: 881 - protein, 19 aa, Homo sapiens
NEADYHDGNGHSLRGMFDY

SEQ ID NO: 882 - protein, 11 aa, Homo sapiens
GTYDSQGSTRL

SEQ ID NO: 883 - protein, 9 aa, Homo sapiens
QHRSNWPWT

SEQ ID NO: 884 - protein, 9 aa, Homo sapiens
QQSFAVPYT

SEQ ID NO: 885 - protein, 16 aa, Homo sapiens
DGLGEVAPDYRYGIDV

SEQ ID NO: 886 - protein, 13 aa, Homo sapiens
DESGDDLKWHLHP

SEQ ID NO: 887 - protein, 5 aa, Homo sapiens
AAFQW
